(19) United States
(12) Patent Application Publication
(10) Pub. No.: US 2011/0038801 A1
(43) Pub. Date: Feb. 17, 2011

(54) METHODS AND COMPOSITIONS FOR IDENTIFYING LUNG CANCER OR A HUMORAL IMMUNE RESPONSE AGAINST LUNG CANCER

(75) Inventors: Karin Jooss, San Diego, CA (US); Andrew D. Simmons, San Mateo, CA (US)

Correspondence Address: JONES DAY, 222 EAST 41ST ST, NEW YORK, NY, 10017, US

(73) Assignee: BioSante Pharmaceuticals, Inc., Lincolnshire, IL (US)

(21) Appl. No.: 12/810,002

(22) PCT Filed: Dec. 19, 2008
(86) PCT No.: PCT/US08/13948

§ 371 Date: Nov. 1, 2010

Related U.S. Application Data
(60) Provisional application No. 61/008,847, filed on Dec. 21, 2007.

(51) Int. Cl. A61B 5/055; A61K 49/00; C40B 30/04; G01N 33/53; C40B 60/12; A61P 35/00; A61P 37/00; G06F 19/00

(52) U.S. Cl. 424/9.3; 424/9.1; 506/9; 435/7.24; 506/39; 702/19

(57) ABSTRACT

Methods and compositions are provided for identifying lung cancer or a humoral immune response against lung cancer. Also disclosed are methods for determining whether a subject is responding or is likely to respond to lung cancer immunotherapy.

### 1. FIELD

[0001] Provided herein are lung cancer markers, compositions comprising such markers, immunoglobulins specific for such markers, and methods of using such markers and/or immunoglobulins to assess an immune response against lung cancer. An immune response against the markers correlates with an immune response, in particular a humoral immune response, against cancer cells which immune response is preferably associated with prophylaxis of lung cancer, treatment of lung cancer, and/or amelioration of at least one symptom associated with lung cancer.

### 2. BACKGROUND

[0002] The immune system plays a critical role in the pathogenesis of a wide variety of cancers. When cancers progress, it is widely believed that the immune system either fails to respond sufficiently or fails to respond appropriately, allowing cancer cells to grow. Currently, standard medical treatments for cancer including chemotherapy, surgery, radiation therapy and cellular therapy have clear limitations with regard to both efficacy and toxicity. To date, these approaches have met with varying degrees of success dependent upon the type of cancer, general health of the patient, stage of disease at the time of diagnosis, etc. Improved strategies that combine specific manipulation of the immune response to cancer in combination with standard medical treatments may provide a means for enhanced efficacy and decreased toxicity.

[0003] One therapeutic approach to cancer treatment involves the use of genetically modified tumor cells which express cytokines locally at the immunotherapy site. Activity has been demonstrated in tumor models using a variety of immunomodulatory cytokines, including IL-4, IL-2, TNF-alpha, G-CSF, IL-7, IL-6 and GM-CSF, as described in Golumbeck P T et al., Science 254:13-716, 1991; Gansbacher B et al., J. Exp. Med. 172:1217-1224, 1990; Fearon E R et al., Cell 60:397-403, 1990; Gansbacher B et al., Cancer Res. 50:7820-25, 1990; Teng M et al., PNAS 88:3535-3539, 1991; Columbo M P et al., J. Exp. Med. 174:1291-1298, 1991; Aoki et al., Proc Natl Acad Sci USA. 89(9):3850-4, 1992; Porgador A, et al., Nat. Immun. 13(2-3):113-30, 1994; DranoffG et al., PNAS 90:3539-3543, 1993; Lee C T et al., Human Gene Therapy 8:187-193, 1997; Nagai E et al., Cancer Immunol. Immunother. 47:2-80, 1998 and Chang A et al., Human Gene Therapy 11:839-850, 2000, respectively. The use of autologous cancer cells as immunotherapy to augment anti-tumor immunity has been explored for some time. See, e.g., Oettgen et al., “The History of Cancer Immunotherapy,” In: Biologic Therapy of Cancer, Devita et al. (eds.) J. Lippincot Co., pp 87-199, 1991; Armstrong T D and Jaffee E M, Surg Oncol Clin N Am. 11(3):681-96, 2002; and Bodey B et al., Anticancer Res 20(4):2665-76, 2000).

[0004] Several phase I/II human trials using GM-CSF-secreting autologous or allogeneic tumor cell vaccines have been performed (Simons et al. Cancer Res 1999 59:5160-8; Soiffer et al. Proc Natl Acad Sci USA 1998 95:13141-6; Simons et al. Cancer Res 1997 57:1537-46; Jaffee et al. J Clin Oncol 2001 19:145-56; Salgia et al. J Clin Oncol 2003 21:624-30; Soiffer et al. J Clin Oncol 2003 21:3343-50; Nemunaitis et al. J Natl Cancer Inst. 2004 Feb. 18 96(4):326-31; Borello and Pardoll, Growth Factor Rev. 13(2):185-93, 2002; and Thomas et al., J. Exp. Med. 200(3)297-306, 2004).

[0005] Administration of genetically modified GM-CSF-expressing cancer cells to a patient results in an immune response, and preliminary clinical efficacy against lung and other cancers has been demonstrated in Phase I/II clinical trails. However, there remains a need for improved methods and compositions for predicting whether such therapies are likely to be effective, for monitoring the effectiveness of such therapies, and for increasing the effectiveness of such therapies. These and other needs are provided by the methods and compositions provided herein.

### 3. SUMMARY

[0006] Provided herein are lung cancer markers, compositions comprising such markers, immunoglobulins specific for such markers, and methods of using such markers and/or immunoglobulins to assess an immune response against lung cancer. An immune response against the markers correlates with an immune response, in particular a humoral immune response, against cancer cells which immune response is preferably associated with prophylaxis of lung cancer, treatment of lung cancer, and/or amelioration of at least one symptom associated with lung cancer. In certain embodiments, the lung cancer is non-small cell lung cancer (NSCLC).

[0007] Thus, in a first aspect, provided herein is a method for identifying whether a subject is afflicted with lung cancer, comprising detecting an immune response against an antigen identified in Table 2, 3 or 4, wherein detection of the immune response indicates that the subject is afflicted with lung cancer. In certain embodiments, an immune response is detected against an antigen identified in Table 2. In certain embodiments, an immune response is detected against an antigen identified in Table 3. In certain embodiments, an immune response is detected against an antigen identified in Table 4. In certain embodiments, an immune response is detected against 1, 2, 3, 4, 5, 6, 7, 8, 9, 10, 11, 12, 13, 14, 15 or more of the antigens in Table 2. In certain embodiments, an immune response is detected against 1, 2, 3, 4, 5, 6, 7, 8, 9, 10, 11, 12, 13, 14, 15 or more of the antigens in Table 3. In certain embodiments, an immune response is detected against 1, 2, 3, 4, 5, 6, 7, 8, 9, 10, 11, 12, 13, 14, 15 or more of the antigens in Table 4. In certain embodiments, the lung cancer is non-small cell lung cancer (NSCLC).

[0008] In certain embodiments, the subject is a mammal. In certain embodiments, the subject is a human. In certain embodiments, the immune response is a humoral immune response. In certain embodiments, the immune response is a cellular immune response.

[0009] In another aspect, provided herein is a method for determining whether a subject is likely to respond to lung cancer therapy with a composition comprising cancer cells that have been rendered proliferation-incompetent and have been genetically engineered to express GM-CSF, comprising detecting an immune response against an antigen listed in Table 2, 3 or 4, wherein detecting the immune response indicates that the subject is likely to respond to said lung cancer therapy. In certain embodiments, the lung cancer therapy is for the treatment of non-small cell lung cancer (NSCLC). In certain embodiments, the lung cancer therapy can be other than a therapy with a composition comprising cancer cells that have been rendered proliferation-incompetent and have been genetically engineered to express GM-CSF; in such embodiments, the lung cancer therapy can be any cancer immunotherapy known to one skilled in the art without limitation.

[0010] In certain embodiments, the subject is a mammal. In certain embodiments, the subject is a human. In certain embodiments, the cancer cells are autologous. In certain embodiments, the cancer cells are allogeneic. In certain embodiments, the cancer cells are LnCaP cells or PC3 cells. In some embodiments, the cancer cells are NCIH838 cells, NCIH1623 cells or NCIH1435 cells.

[0011] In certain embodiments, an immune response is detected against an antigen identified in Table 2. In certain embodiments, an immune response is detected against an antigen identified in Table 3. In certain embodiments, an immune response is detected against an antigen identified in Table 4. In certain embodiments, an immune response is detected against 1, 2, 3, 4, 5, 6, 7, 8, 9, 10, 11, 12, 13, 14, 15 or more of the antigens in Table 2. In certain embodiments, an immune response is detected against 1, 2, 3, 4, 5, 6, 7, 8, 9, 10, 11, 12, 13, 14, 15 or more of the antigens in Table 3. In certain embodiments, an immune response is detected against 1, 2, 3, 4, 5, 6, 7, 8, 9, 10, 11, 12, 13, 14, 15 or more of the antigens in Table 4.

[0012] In certain embodiments, responsiveness to the cancer therapy is measured by decreased serum concentrations of tumor specific markers, increased overall survival time, increased progression-free survival, decreased tumor size, decreased metastasis marker response, increased impact on minimal residual disease, increased induction of antibody response to the cancer cells that have been rendered proliferation-incompetent, increased induction of delayed-type-hypersensitivity (DTH) response to injections of autologous tumor, increased induction of T cell response to autologous tumor or candidate tumor-associated antigens, increased impact on circulating T cell and dendritic cell numbers, phenotype, and/or function, cytokine response, reduced metastasis as measured by bone scan/MRI or other methods, increased time to progression, decreased serum concentrations of ICTP, decreased concentrations of serum C-reactive protein or decreased numbers of circulating tumor cells (CTCs).

[0013] In certain embodiments, responsiveness to the cancer therapy is measured by decreased serum concentrations of tumor specific markers. In certain embodiments, responsiveness to the cancer therapy is measured by increased overall survival time. In certain embodiments, responsiveness to the cancer therapy is measured by increased progression-free survival. In certain embodiments, responsiveness to the cancer therapy is measured by decreased tumor size. In certain embodiments, responsiveness to the cancer therapy is measured by decreased metastasis marker response. In certain embodiments, responsiveness to the cancer therapy is measured by increased impact on minimal residual disease. In certain embodiments, responsiveness to the cancer therapy is measured by increased induction of antibody response to the cancer cells that have been rendered proliferation-incompetent. In certain embodiments, responsiveness to the cancer therapy is measured by increased induction of delayed-type-hypersensitivity (DTH) response to injections of autologous tumor. In certain embodiments, responsiveness to the cancer therapy is measured by increased induction of T cell response to autologous tumor or candidate tumor-associated antigens or decreased numbers of circulating tumor cells (CTCs). In certain embodiments, responsiveness to the cancer therapy is measured by increased impact on circulating T cell and dendritic cell numbers, phenotype, and/or function. In certain embodiments, responsiveness to the cancer therapy is measured by cytokine response. In certain embodiments, responsiveness to the cancer therapy is measured by decreased numbers of circulating tumor cells (CTCs).

[0014] In certain embodiments, the immune response is a humoral immune response. In certain embodiments, the immune response is a cellular immune response.

[0015] In another aspect, provided herein is a computer-implemented method for determining whether a subject is likely to respond to lung cancer therapy with a composition comprising cancer cells that have been rendered proliferation-incompetent and have been genetically engineered to express GM-CSF, comprising inputting into a computer memory data indicating whether an immune response against an antigen listed in Table 2, 3 or 4 is detected, inputting into the computer memory a correlation between an immune response against an antigen listed in Table 2, 3, or 4 and a likelihood of responding to said therapy, and determining whether the subject is likely to respond to said therapy. In certain embodiments, an immune response is detected against an antigen identified in Table 2. In certain embodiments, an immune response is detected against an antigen identified in Table 3. In certain embodiments, an immune response is detected against an antigen identified in Table 4. In certain embodiments, an immune response is detected against 1, 2, 3, 4, 5, 6, 7, 8, 9, 10, 11, 12, 13, 14, 15 or more of the antigens in Table 2. In certain embodiments, an immune response is, detected against 1, 2, 3, 4, 5, 6, 7, 8, 9, 10, 11, 12, 13, 14, 15 or more of the antigens in Table 3. In certain embodiments, an immune response is detected against 1, 2, 3, 4, 5, 6, 7, 8, 9, 10, 11, 12, 13, 14, 15 or more of the antigens in Table 4. In certain embodiments, the lung cancer therapy is for the treatment of non-small cell lung cancer (NSCLC).

[0016] In certain embodiments, the subject is a mammal. In certain embodiments, the subject is a human.

[0017] In certain embodiments, the cancer cells are autologous. In certain embodiments, the cancer cells are allogeneic. In certain embodiments, the cancer cells are LnCaP cells or PC3 cells. In some embodiments, the cancer cells are NCIH838 cells, NCIH1623 cells or NCIH1435 cells.

[0018] In certain embodiments, responsiveness to the cancer therapy is measured by decreased serum concentrations of tumor specific markers, increased overall survival time, increased progression-free survival, decreased tumor size, decreased metastasis marker response, increased impact on minimal residual disease, increased induction of antibody response to the cancer cells that have been rendered proliferation-incompetent, increased induction of delayed-type-hypersensitivity (DTH) response to injections of autologous tumor, increased induction of T cell response to autologous tumor or candidate tumor-associated antigens, increased impact on circulating T cell and dendritic cell numbers, phenotype, and/or function, cytokine response, reduced metastasis as measured by bone scan/MRI, increased time to progression, decreased serum concentrations of ICTP, or decreased concentrations of serum C-reactive protein or decreased numbers of circulating tumor cells. In certain embodiments, responsiveness to the cancer therapy is measured by decreased numbers of circulating tumor cells.

[0019] In certain embodiments, responsiveness to the cancer therapy is measured by decreased serum concentrations of tumor specific markers. In certain embodiments, responsiveness to the cancer therapy is measured by increased overall survival time. In certain embodiments, responsiveness to the cancer therapy is measured by increased progression-free survival. In certain embodiments, responsiveness to the cancer therapy is measured by decreased tumor size. In certain embodiments, responsiveness to the cancer therapy is measured by decreased metastasis marker response. In certain embodiments, responsiveness to the cancer therapy is measured by increased impact on minimal residual disease. In certain embodiments, responsiveness to the cancer therapy is measured by increased induction of antibody response to the cancer cells that have been rendered proliferation-incompetent. In certain embodiments, responsiveness to the cancer therapy is measured by increased induction of delayed-type-hypersensitivity (DTH) response to injections of autologous tumor. In certain embodiments, responsiveness to the cancer therapy is measured by increased induction of T cell response to autologous tumor or candidate tumor-associated antigens. In certain embodiments, responsiveness to the cancer therapy is measured by increased impact on circulating T cell and dendritic cell numbers, phenotype, and/or function. In certain embodiments, responsiveness to the cancer therapy is measured by cytokine response. In certain embodiments, responsiveness to the cancer therapy is measured by decreased numbers of circulating tumor cells.

[0020] In certain embodiments, the immune response is a humoral immune response. In certain embodiments, the immune response is a cellular immune response.

[0021] In another aspect, provided herein is a method for determining whether a subject is responding to lung cancer therapy with a composition comprising cancer cells that have been rendered proliferation-incompetent and have been genetically engineered to express GM-CSF, comprising administering an effective amount of a composition comprising cancer cells that have been rendered proliferation-incompetent and have been genetically engineered to express GM-CSF, and detecting an immune response against an antigen listed in Table 2, 3 or 4, wherein detecting the immune response indicates that the subject is responding to said lung cancer therapy. In certain embodiments, an immune response is detected against an antigen identified in Table 2. In certain embodiments, an immune response is detected against an antigen identified in Table 3. In certain embodiments, an immune response is detected against an antigen identified in Table 4. In certain embodiments, an immune response is detected against 1, 2, 3, 4, 5, 6, 7, 8, 9, 10, 11, 12, 13, 14, 15 or more of the antigens in Table 2. In certain embodiments, an immune response is detected against 1, 2, 3, 4, 5, 6, 7, 8, 9, 10, 11, 12, 13, 14, 15 or more of the antigens in Table 3. In certain embodiments, an immune response is detected against 1, 2, 3, 4, 5, 6, 7, 8, 9, 10, 11, 12, 13, 14, 15 or more of the antigens in Table 4. In certain embodiments, the lung cancer therapy is for the treatment of non-small cell lung cancer (NSCLC).

[0022] In certain embodiments, the subject is a mammal. In certain embodiments, the subject is a human. In certain embodiments, the cancer cells are autologous. In certain embodiments, the cancer cells are allogeneic. In certain embodiments, the cancer cells are LnCaP cells or PC3 cells. In some embodiments, the cancer cells are NCIH838 cells, NCIH1623 cells or NCIH1435 cells.

[0023] In certain embodiments, responsiveness to the cancer therapy is measured by decreased serum concentrations of tumor specific markers, increased overall survival time, increased progression-free survival, decreased tumor size, decreased metastasis marker response, increased impact on minimal residual disease, increased induction of antibody response to the cancer cells that have been rendered proliferation-incompetent, increased induction of delayed-type-hypersensitivity (DTH) response to injections of autologous tumor, increased induction of T cell response to autologous tumor or candidate tumor-associated antigens, or increased impact on circulating T cell and dendritic cell numbers, phenotype, and/or function, cytokine response, or decreased numbers of circulating tumor cells.

[0024] In certain embodiments, responsiveness to the cancer therapy is measured by decreased serum concentrations of tumor specific markers. In certain embodiments, responsiveness to the cancer therapy is measured by increased overall survival time. In certain embodiments, responsiveness to the cancer therapy is measured by increased progression-free survival. In certain embodiments, responsiveness to the cancer therapy is measured by decreased tumor size. In certain embodiments, responsiveness to the cancer therapy is measured by decreased metastasis marker response. In certain embodiments, responsiveness to the cancer therapy is measured by increased impact on minimal residual disease. In certain embodiments, responsiveness to the cancer therapy is measured by increased induction of antibody response to the cancer cells that have been rendered proliferation-incompetent. In certain embodiments, responsiveness to the cancer therapy is measured by increased induction of delayed-type-hypersensitivity (DTH) response to injections of autologous tumor. In certain embodiments, responsiveness to the cancer therapy is measured by increased induction of T cell response to autologous tumor or candidate tumor-associated antigens. In certain embodiments, wherein responsiveness to the cancer therapy is measured by increased impact on circulating T cell and dendritic cell numbers, phenotype, and/or function, cytokine response, or decreased numbers of circulating tumor cells.

[0025] In certain embodiments, the immune response is a humoral immune response. In certain embodiments, the immune response is a cellular immune response.

[0026] In yet another aspect, provided herein is a computer-implemented method for determining whether a subject responding to lung cancer therapy with a composition comprising cancer cells that have been rendered proliferation-incompetent and have been genetically engineered to express GM-CSF, comprising administering an effective amount of a composition comprising cancer cells that have been rendered proliferation-incompetent and have been genetically engineered to express GM-CSF, inputting into a computer memory data indicating whether an immune response against an antigen listed in Table 2, 3 or 4 is detected, inputting into the computer memory a correlation between an immune response against an antigen listed in Table 2, 3 or 4 and responsiveness to said therapy, and determining whether the subject is responding to said therapy. In certain embodiments, an immune response is detected against an antigen identified in Table 2. In certain embodiments, an immune response is detected against an antigen identified in Table 3. In certain embodiments, an immune response is detected against an antigen identified in Table 4. In certain embodiments, an immune response is detected against 1, 2, 3, 4, 5, 6, 7, 8, 9, 10, 11, 12, 13, 14, 15 or more of the antigens in Table 2. In certain embodiments, an immune response is detected against 1, 2, 3, 4, 5, 6, 7, 8, 9, 10, 11, 12, 13, 14, 15 or more of the antigens in Table 3. In certain embodiments, an immune response is detected against 1, 2, 3, 4, 5, 6, 7, 8, 9, 10, 11, 12, 13, 14, 15 or more of the antigens in Table 4. In certain embodiments, the lung cancer therapy is for the treatment of non-small cell lung cancer (NSCLC).

[0027] In certain embodiments, the subject is a mammal. In certain embodiments, the subject is a human.

[0028] In certain embodiments, the cancer cells are autologous. In certain embodiments, the cancer cells are allogeneic. In certain embodiments, the cancer cells are LnCaP cells or PC3 cells. In some embodiments, the cancer cells are NCIH838 cells, NCIH1623 cells or NCIH1435 cells.

[0029] In certain embodiments, responsiveness to the cancer therapy is measured by decreased serum concentrations of tumor specific markers, increased overall survival time, increased progression-free survival, decreased tumor size, decreased metastasis marker response, increased impact on minimal residual disease, increased induction of antibody response to the cancer cells that have been rendered proliferation-incompetent, increased induction of delayed-type-hypersensitivity (DTH) response to injections of autologous tumor, increased induction of T cell response to autologous tumor or candidate tumor-associated antigens, or increased impact on circulating T cell and dendritic cell numbers, phenotype, and/or function, cytokine response, or decreased numbers of circulating tumor cells.

[0030] In certain embodiments, responsiveness to the cancer therapy is measured by decreased serum concentrations of tumor specific markers. In certain embodiments, responsiveness to the cancer therapy is measured by increased overall survival time. In certain embodiments, responsiveness to the cancer therapy is measured by increased progression-free survival. In certain embodiments, responsiveness to the cancer therapy is measured by decreased tumor size. In certain embodiments, responsiveness to the cancer therapy is measured by decreased metastasis marker response. In certain embodiments, responsiveness to the cancer therapy is measured by increased impact on minimal residual disease. In certain embodiments, responsiveness to the cancer therapy is measured by increased induction of antibody response to the cancer cells that have been rendered proliferation-incompetent. In certain embodiments, responsiveness to the cancer therapy is measured by increased induction of delayed-type-hypersensitivity (DTH) response to injections of autologous tumor. In certain embodiments, responsiveness to the cancer therapy is measured by increased induction of T cell response to autologous tumor or candidate tumor-associated antigens. In certain embodiments, responsiveness to the cancer therapy is measured by increased impact on circulating T cell and dendritic cell numbers, phenotype, and/or function, cytokine response, or decreased numbers of circulating tumor cells.

[0031] In certain embodiments, the immune response is a humoral immune response. In certain embodiments, the immune response is a cellular immune response.

[0032] In yet another aspect, provided herein is a method for determining whether a subject is responding to lung cancer therapy with a composition comprising cancer cells that have been rendered proliferation-incompetent and have been genetically engineered to express GM-CSF, comprising detecting an immune response against an antigen listed in Table 2, 3 or 4 at a first time, administering an effective amount of a composition comprising cancer cells that have been rendered proliferation-incompetent and have been genetically engineered to express GM-CSF, and detecting an immune response against the antigen listed in Table 2, 3 or 4 at a later second time, wherein an increase in the immune response detected at the later second time relative to the earlier first time indicates that the subject is responding to said lung cancer therapy. In certain embodiments, an immune response is detected at the first and second times against an antigen identified in Table 2. In certain embodiments, an immune response is detected at the first and second times against an antigen identified in Table 3. In certain embodiments, an immune response is detected at the first and second times against an antigen identified in Table 4. In certain embodiments, an immune response is detected at the first and second times against 1, 2, 3, 4, 5, 6, 7, 8, 9, 10, 11, 12, 13, 14, 15 or more of the antigens in Table 2. In certain embodiments, an immune response is detected at the first and second times against 1, 2, 3, 4, 5, 6, 7, 8, 9, 10, 11, 12, 13, 14, 15 or more of the antigens in Table 3. In certain embodiments, an immune response is detected at the first and second times against 1, 2, 3, 4, 5, 6, 7, 8, 9, 10, 11, 12, 13, 14, 15 or more of the antigens in Table 4. In certain embodiments, the lung cancer therapy is for the treatment of non-small cell lung cancer (NSCLC).

[0033] In certain embodiments, the subject is a mammal. In certain embodiments, wherein the subject is a human. In certain embodiments, the cancer cells are autologous. In certain embodiments, the cancer cells are allogeneic. In certain embodiments, the cancer cells are LnCaP cells or PC3 cells. In some embodiments, the cancer cells are NCIH838 cells, NCIH1623 cells or NCIH1435 cells. In certain embodiments, responsiveness to the cancer therapy is measured by decreased serum concentrations of tumor specific markers, increased overall survival time, increased progression-free survival, decreased tumor size, decreased metastasis marker response, increased impact on minimal residual disease, increased induction of antibody response to the cancer cells that have been rendered proliferation-incompetent, increased induction of delayed-type-hypersensitivity (DTH) response to injections of autologous tumor, increased induction of T cell response to autologous tumor or candidate tumor-associated antigens, increased impact on circulating T cell and dendritic cell numbers, phenotype, and/or function, cytokine response, reduced metastasis as measured by bone scan/MRI or other methods, increased time to progression, decreased serum concentrations of ICTP, decreased concentrations of serum C-reactive protein or decreased numbers of circulating tumor cells (CTCs).

[0034] In certain embodiments, responsiveness to the cancer therapy is measured by decreased serum concentrations of tumor specific markers. In certain embodiments, responsiveness to the cancer therapy is measured by increased overall survival time. In certain embodiments, responsiveness to the cancer therapy is measured by increased progression-free survival. In certain embodiments, responsiveness to the cancer therapy is measured by decreased tumor size. In certain embodiments, responsiveness to the cancer therapy is measured by decreased metastasis marker response. In certain embodiments, responsiveness to the cancer therapy is measured by increased impact on minimal residual disease. In certain embodiments, responsiveness to the cancer therapy is measured by increased induction of antibody response to the cancer cells that have been rendered proliferation-incompetent. In certain embodiments, responsiveness to the cancer therapy is measured by increased induction of delayed-type-hypersensitivity (DTH) response to injections of autologous tumor. In certain embodiments, responsiveness to the cancer therapy is measured by increased induction of T cell response to autologous tumor or candidate tumor-associated antigens. In certain embodiments, responsiveness to the cancer therapy is measured by increased impact on circulating T cell and dendritic cell numbers, phenotype, and/or function. In certain embodiments, responsiveness to the cancer therapy is measured by cytokine response. In certain embodiments, responsiveness to the cancer therapy is measured by reduced metastasis as measured by bone scan/MRI or other methods. In certain embodiments, responsiveness to the cancer therapy is measured by increased time to progression. In certain embodiments, responsiveness to the cancer therapy is measured by decreased serum concentrations of ICTP. In certain embodiments, responsiveness to the cancer therapy is measured by decreased concentrations of serum C-reactive protein. In certain embodiments, responsiveness to the cancer therapy is measured by decreased numbers of circulating tumor cells.

[0035] In certain embodiments, the immune response detected at the first and second times is a humoral immune response. In certain embodiments, the immune response detected at the first and second times is a cellular immune response.

[0036] In still another aspect, provided herein is a computer-implemented method for determining whether a subject is responding to lung cancer therapy with a composition comprising cancer cells that have been rendered proliferation-incompetent and have been genetically engineered to express GM-CSF, comprising administering an effective amount of a composition comprising cancer cells that have been rendered proliferation-incompetent and have been genetically engineered to express GM-CSF, inputting into a computer memory data indicating whether an immune response against an antigen listed in Table 2, 3 or 4 is detected at a first time prior to said step of administering and at a later second time subsequent to said step of administering, inputting into the computer memory a correlation between an increase in the immune response against the antigen listed in Table 2, 3 or 4 at said later second time relative to said earlier first time and responsiveness to said therapy, and determining whether the subject is responding to said therapy.

[0037] In certain embodiments, an immune response is detected at the first and second times against an antigen identified in Table 2. In certain embodiments, an immune response is detected at the first and second times against an antigen identified in Table 3. In certain embodiments, an immune response is detected at the first and second times against an antigen identified in Table 4. In certain embodiments, an immune response is detected at the first and second times against 1, 2, 3, 4, 5, 6, 7, 8, 9, 10, 11, 12, 13, 14, 15 or more of the antigens in Table 2. In certain embodiments, an immune response is detected at the first and second times against 1, 2, 3, 4, 5, 6, 7, 8, 9, 10, 11, 12, 13, 14, 15 or more of the antigens in Table 3. In certain embodiments, an immune response is detected at the first and second times against 1, 2, 3, 4, 5, 6, 7, 8, 9, 10, 11, 12, 13, 14, 15 or more of the antigens in Table 4. In certain embodiments, the lung cancer therapy is for the treatment of non-small cell lung cancer (NSCLC).

[0038] In certain embodiments, the subject is a mammal. In certain embodiments, the subject is a human. In certain embodiments, the cancer cells are autologous. In certain embodiments, the cancer cells are allogeneic. In certain embodiments, the cancer cells are LnCaP cells or PC3 cells. In some embodiments, the cancer cells are NCIH838 cells, NCIH1623 cells or NCIH1435 cells.

[0039] In certain embodiments, responsiveness to the cancer therapy is measured by decreased serum concentrations of tumor specific markers, increased overall survival time, increased progression-free survival, decreased tumor size, decreased metastasis marker response, increased impact on minimal residual disease, increased induction of antibody response to the cancer cells that have been rendered proliferation-incompetent, increased induction of delayed-type-hypersensitivity (DTH) response to injections of autologous tumor, increased induction of T cell response to autologous tumor or candidate tumor-associated antigens, increased impact on circulating T cell and dendritic cell numbers, phenotype, and function, cytokine response, reduced metastasis as measured by bone scan/MRI, increased time to progression, decreased serum concentrations of ICTP, decreased concentrations of serum C-reactive protein or decreased numbers of circulating tumor cells.

[0040] In certain embodiments, responsiveness to the cancer therapy is measured by decreased serum concentrations of tumor specific markers. In certain embodiments, responsiveness to the cancer therapy is measured by increased overall survival time. In certain embodiments, responsiveness to the cancer therapy is measured by increased progression-free survival. In certain embodiments, responsiveness to the cancer therapy is measured by decreased tumor size. In certain embodiments, responsiveness to the cancer therapy is measured by decreased metastasis marker response. In certain embodiments, responsiveness to the cancer therapy is measured by increased impact on minimal residual disease. In certain embodiments, responsiveness to the cancer therapy is measured by increased induction of antibody response to the cancer cells that have been rendered proliferation-incompetent. In certain embodiments, responsiveness to the cancer therapy is measured by increased induction of delayed-type-hypersensitivity (DTH) response to injections of autologous tumor. In certain embodiments, responsiveness to the cancer therapy is measured by increased induction of T cell response to autologous tumor or candidate tumor-associated antigens. In certain embodiments, responsiveness to the cancer therapy is measured by increased impact on circulating T cell and dendritic cell numbers, phenotype, and/or function. In certain embodiments, responsiveness to the cancer therapy is measured by cytokine response. In certain embodiments, responsiveness to the cancer therapy is measured by reduced metastasis as measured by bone scan/MRI. In certain embodiments, responsiveness to the cancer therapy is measured by increased time to progression. In certain embodiments, responsiveness to the cancer therapy is measured by decreased serum concentrations of ICTP. In certain embodiments, responsiveness to the cancer therapy is measured by decreased concentrations of serum C-reactive protein. In certain embodiments, responsiveness to the cancer therapy is measured by decreased numbers of circulating tumor cells.

[0041] In certain embodiments, the immune response is a humoral immune response. In certain embodiments, the immune response is a cellular immune response.

[0042] In still another aspect, provided herein is a computer-readable media embedded with computer executable instructions for performing a method described herein.

[0043] In yet another aspect, provided herein is a computer system configured to perform a method described herein.

### 4. DETAILED DESCRIPTION

[0044] Provided herein are lung cancer markers, compositions comprising such markers, immunoglobulins specific for such markers, and methods of using such markers and/or immunoglobulins to assess an immune response against cancer. The markers, compositions, immunoglobulins, and methods are useful, for example, for assessing an immune response, in particular a humoral immune response, against cancer cells which immune response is preferably associated with prophylaxis of lung cancer, treatment of lung cancer, and/or amelioration of at least one symptom associated with lung cancer. In certain embodiments, the lung cancer is non-small cell lung cancer (NSCLC).

[0045] Without intending to be bound to any particular theory or mechanism of action, it is believed that one aspect of the immune response induced by therapy with genetically modified tumor cells that express a cytokine is an immune response against certain polypeptides expressed by the genetically modified tumor cell and/or cells from the tumor afflicting the subject. It is also believed that this immune response plays an important role in the effectiveness of this therapy to treat, e.g., non-small cell lung cancer.

### 4.1 DEFINITIONS

[0046] By the term “cytokine” or grammatical equivalents, herein is meant the general class of hormones of the cells of the immune system, including lymphokines, monokines, and others. The definition includes, without limitation, those hormones that act locally and do not circulate in the blood, and which, when used in accord with the methods provided herein, will result in an alteration of an individual's immune response. The term “cytokine” or “cytokines” as used herein refers to the general class of biological molecules, which affect cells of the immune system. The definition is meant to include, but is not limited to, those biological molecules that act locally or may circulate in the blood, and which, when used in the compositions or methods provided herein, serve to regulate or modulate an individual's immune response to cancer. Exemplary cytokines for use in practicing the methods provided herein include, but are not limited to, interferon-alpha (IFN-alpha), IFN-beta, and IFN-gamma, interleukins (e.g., IL-1 to IL-29, in particular, IL-2, IL-7, IL-12, IL-15 and IL-18), tumor necrosis factors (e.g., TNF-alpha and TNF-beta), erythropoietin (EPO), MIP3a, ICAM, macrophage colony stimulating factor (M-CSF), granulocyte colony stimulating factor (G-CSF) and granulocyte-macrophage colony stimulating factor (GM-CSF).

[0047] As used herein, the terms “cancer”, “cancer cells”, “neoplastic cells”, “neoplasia”, “tumor”, and “tumor cells” (used interchangeably) refer to cells that exhibit relatively autonomous growth, so that they exhibit an aberrant growth phenotype or aberrant cell status characterized by a significant loss of control of cell proliferation. A tumor cell may be a hyperplastic cell, a cell that shows a lack of contact inhibition of growth in vitro or in vivo, a cell that is incapable of metastasis in vivo, or a cell that is capable of metastasis in vivo. Neoplastic cells can be malignant or benign. It follows that cancer cells are considered to have an aberrant cell status. “Tumor cells” may be derived from a primary tumor or derived from a tumor metastases. The “tumor cells” may be recently isolated from a patient (a “primary tumor cell”) or may be the product of long term in vitro culture.

[0048] The term “primary tumor cell” is used in accordance with the meaning in the art. A primary tumor cell is a cancer cell that is isolated from a tumor in a mammal and has not been extensively cultured in vitro.

[0049] The term “antigen from a tumor cell” and “tumor antigen” and “tumor cell antigen” may be used interchangeably herein and refer to any protein, peptide, carbohydrate or other component derived from or expressed by a tumor cell which is capable of eliciting an immune response. The definition is meant to include, but is not limited to, whole tumor cells, tumor cell fragments, plasma membranes taken from a tumor cell, proteins purified from the cell surface or membrane of a tumor cell, unique carbohydrate moieties associated with the cell surface of a tumor cell or tumor antigens expressed from a vector in a cell. The definition also includes those antigens from the surface of the cell, which require special treatment of the cells to access.

[0050] The term “genetically modified tumor cell” as used herein refers to a composition comprising a population of cells that has been genetically modified to express a transgene, and that is administered to a patient as part of a cancer treatment regimen. The genetically modified tumor cell immunotherapy comprises tumor cells which are “autologous” or “allogeneic” to the patient undergoing treatment or “bystander cells” that are mixed with tumor cells taken from the patient. A GM-CSF-expressing genetically modified tumor cell immunotherapy may be referred to herein as “GVAX”®. Autologous and allogeneic cancer cells that have been genetically modified to express a cytokine, e.g., GM-CSF, followed by readministration to a patient for the treatment of cancer are described in U.S. Pat. Nos. 5,637,483, 5,904,920, 6,277,368 and 6,350,445, each of which is expressly incorporated by reference herein. A form of GM-CSF-expressing genetically modified cancer cells or a “cytokine-expressing cellular immunotherapy” for the treatment of pancreatic cancer is described in U.S. Pat. Nos. 6,033,674 and 5,985,290, both of which are expressly incorporated by reference herein. A universal immunomodulatory cytokine-expressing bystander cell line is described in U.S. Pat. No. 6,464,973, expressly incorporated by reference herein.

[0051] The term “enhanced expression” as used herein, refers to a cell producing higher levels of a particular protein than would be produced by the naturally occurring cell or the parental cell from which it was derived. Cells may be genetically modified to increase the expression of a cytokine, such as GM-CSF, or an antigen that elicits an immune response following administration of a cytokine-expressing cellular immunotherapy, such as GVAX®. The expression of an endogenous antigen may be increased using any method known in the art, such as genetically modifying promoter regions of genomic sequences or genetically altering cellular signaling pathways to increase production of the antigen. Also, cells can be transduced with a vector coding for the antigen or immunogenic fragment thereof.

[0052] By the term “systemic immune response” or grammatical equivalents herein is meant an immune response which is not localized, but affects the individual as a whole, thus allowing specific subsequent responses to the same stimulus.

[0053] As used herein, the term “proliferation-incompetent” or “inactivated” refers to cells that are unable to undergo multiple rounds of mitosis, but still retain the capability to express proteins such as cytokines or tumor antigens. This may be achieved through numerous methods known to those skilled in the art. Embodiments of the methods include, but are not limited to, treatments that inhibit at least about 95%, at least about 99% or substantially 100% of the cells from further proliferation. In one embodiment, the cells are irradiated at a dose of from about 50 to about 200 rads/min or from about 120 to about 140 rads/min prior to administration to the mammal. Typically, when using irradiation, the levels required are 2,500 rads, 5,000 rads, 10,000 rads, 15,000 rads or 20,000 rads. In several embodiments, the cells produce beta-filamin or immunogenic fragment thereof, two days after irradiation, at a rate that is at least about 10%, at least about 20%, at least about 50% or at least about 100% of the pre-irradiated level, when standardized for viable cell number. In one embodiment, cells are rendered proliferation incompetent by irradiation prior to administration to the subject.

[0054] By the term “individual”, “subject” or grammatical equivalents thereof is meant any one individual mammal.

[0055] By the term “reversal of an established tumor” or grammatical equivalents herein is meant the suppression, regression, or partial or complete disappearance of a pre-existing tumor. The definition is meant to include any diminution in the size, potency or growth rate of a pre-existing tumor.

[0056] The terms “treatment”, “therapeutic use”, or “medicinal use” as used herein, shall refer to any and all uses of the claimed compositions which remedy a disease state or symptom, or otherwise prevent, hinder, retard, or reverse the progression of disease or other undesirable symptoms in any way whatsoever.

[0057] The term “administered” refers to any method that introduces cells of a cancer immunotherapy described herein (e.g. genetically modified GM-CSF expressing cancer cells) to a mammal. This includes, but is not limited to, intradermal, parenteral, intramuscular, subcutaneous, intraperitoneal, intranasal, intravenous (including via an indwelling catheter), intratumoral, via an afferent lymph vessel, or by another route that is suitable in view of the patient's condition. The compositions provided herein may be administered to the subject at any site. For example, they can be delivered to a site that is “distal” to or “distant” from the primary tumor.

[0058] The term “increased immune response” as used herein means that a detectable increase of a specific immune activation is detectable (e.g. an increase in B-cell and/or T-cell response and/or NK cell response). An example of an increased immune response is an increase in the amount of an antibody that binds an antigen which is not detected or is detected a lower level prior to administration of a cytokine-expressing cellular immunotherapy provided herein. Another example, is an increased cellular immune response. A cellular immune response involves T cells, and can be observed in vitro (e.g. measured by a Chromium release assay) or in vivo. An increased immune response is typically accompanied by an increase of a specific population of immune cells.

[0059] By the term “retarding the growth of a tumor” is meant the slowing of the growth rate of a tumor, the inhibition of an increase in tumor size or tumor cell number, or the reduction in tumor cell number, tumor size, or numbers of tumors.

[0060] The term “inhibiting tumor growth” refers to any measurable decrease in tumor mass, tumor volume, amount of tumor cells or growth rate of the tumor. Measurable decreases in tumor mass can be detected by numerous methods known to those skilled in the art. These include direct measurement of accessible tumors, counting of tumor cells (e.g. present in blood), measurements of tumor antigens, Alphafetoprotein (AFP) and various visualization techniques (e.g. MRI, CAT-scan and X-rays). Decreases in the tumor growth rate typically correlates with longer survival time for a mammal with cancer.

[0061] By the term “therapeutically effective amount” or grammatical equivalents herein refers to an amount of an agent, e.g., a cytokine-expressing cellular immunotherapy provided herein, that is sufficient to modulate, either by stimulation or suppression, the immune response of an individual. This amount may be different for different individuals, different tumor types, and different preparations. The “therapeutically effective amount” is determined using procedures routinely employed by those of skill in the art such that an “improved therapeutic outcome” results.

[0062] As used herein, the terms “improved therapeutic outcome” and “enhanced therapeutic efficacy”, relative to cancer refers to a slowing or diminution of the growth of cancer cells or a solid tumor, or a reduction in the total number of cancer cells or total tumor burden. An “improved therapeutic outcome” or “enhanced therapeutic efficacy” therefore means there is an improvement in the condition of the patient according to any clinically acceptable criteria, including an increase in life expectancy or an improvement in quality of life (as further described herein)

[0063] The term “nucleic acid” refers to deoxyribonucleotides or ribonucleotides and polymers thereof (“polynucleotides”) in either single- or double-stranded form. Unless specifically limited, the term encompasses nucleic acids containing known analogues of natural nucleotides that have similar binding properties as the reference nucleic acid and are metabolized in a manner similar to naturally occurring nucleotides. Unless otherwise indicated, a particular nucleic acid molecule/polynucleotide also implicitly encompasses conservatively modified variants thereof (e.g. degenerate codon substitutions) and complementary sequences and as well as the sequence explicitly indicated. Specifically, degenerate codon substitutions may be achieved by generating sequences in which the third position of one or more selected (or all) codons is substituted with mixed-base and/or deoxyinosine residues (Batzer et al., Nucleic Acid Res. 19: 5081 (1991); Ohtsuka et al., J. Biol. Chem. 260: 2605-2608 (1985); Rossolini et al., Mol. Cell. Probes 8: 91-98 (1994)). Nucleotides are indicated by their bases by the following standard abbreviations: adenine (A), cytosine (C), thymine (T), and guanine (G).

[0064] Stringent hybridization conditions” and “stringent wash conditions” in the context of nucleic acid hybridization experiments such as Southern and Northern hybridizations are sequence dependent, and are different under different environmental parameters. Longer sequences hybridize at higher temperatures. An extensive guide to the hybridization of nucleic acids is found in Tijssen (1993) Laboratory Techniques in Biochemistry and Molecular Biology-Hybridization with Nucleic Acid Probes part 1 chapter 2 “Overview of principles of hybridization and the strategy of nucleic acid probe assays” Elsevier, New York. Generally, highly stringent hybridization and wash conditions are selected to be about 5° C. to 20° C. (preferably 5° C.) lower than the thermal melting point (Tₘ) for the specific sequence at a defined ionic strength and pH. Typically, under highly stringent conditions a probe will hybridize to its target subsequence, but to no other unrelated sequences.

[0065] The Tₘ is the temperature (under defined ionic strength and pH) at which 50% of the target sequence hybridizes to a perfectly matched probe. Very stringent conditions are selected to be equal to the Tₘ for a particular probe. An example of stringent hybridization conditions for hybridization of complementary nucleic acids that have more than 100 complementary residues on a filter in a Southern or northern blot is 50% formamide with 1 mg of heparin at 42° C., with the hybridization being carried out overnight. An example of highly stringent wash conditions is 0.1 5M NaCl at 72° C. for about 15 minutes. An example of stringent wash conditions is a 0.2×SSC wash at 65° C. for 15 minutes (see, Sambrook, infra, for a description of SSC buffer). Often, a high stringency wash is preceded by a low stringency wash to remove background probe signal. An example medium stringency wash for a duplex of, e.g., more than 100 nucleotides, is 1×SSC at 45° C. for 15 minutes. An example low stringency wash for a duplex of, e.g., more than 100 nucleotides, is 4-6×SSC at 40° C. for 15 minutes. For short probes (e.g., about 10 to 50 nucleotides), stringent conditions typically involve salt concentrations of less than about 1.0M Na ion, typically about 0.01 to 1.0 M Na ion concentration (or other salts) at pH 7.0 to 8.3, and the temperature is typically at least about 30° C. Stringent conditions can also be achieved with the addition of destabilizing agents such as formamide. In general, a signal to noise ratio of 2× (or higher) than that observed for an unrelated probe in the particular hybridization assay indicates detection of a specific hybridization

[0066] The terms “identical” or percent “identity” in the context of two or more nucleic acid or protein sequences, refer to two or more sequences or subsequences that are the same or have a specified percentage of amino acid residues or nucleotides that are the same, when compared and aligned for maximum correspondence, as measured using one of the sequence comparison algorithms described herein or by visual inspection

[0067] For sequence comparison, typically one sequence acts as a reference sequence to which test sequences are compared. When using a sequence comparison algorithm, test and reference sequences are input into a computer, subsequence coordinates are designated if necessary, and sequence algorithm program parameters are designated. The sequence comparison algorithm then calculates the percent sequence identity for the test sequence(s) relative to the reference sequence, based on the designated program parameters.

[0068] Optimal alignment of sequences for comparison can be conducted, e.g., by the local homology algorithm of Smith & Waterman, Adv. Appl. Math. 2:482 (1981), by the homology alignment algorithm of Needleman & Wunsch, J. Mol. Biol. 48: 443 (1970), by the search for similarity method of Pearson & Lipman, Proc. Nat'l. Acad. Sci. USA 85:2444 (1988), by computerized implementations of these algorithms (GAP, BESTFIT, FASTA, and TFASTA in the Wisconsin Genetics Software Package, Genetics Computer Group, 575 Science Dr., Madison, Wis.), by the BLAST algorithm, Altschul et al., J. Mol. Biol. 215: 403-410 (1990), with software that is publicly available through the National Center for Biotechnology Information, or by visual inspection (see generally, Ausubel et al., infra). For purposes of the compositions and methods provided herein, optimal alignment of sequences for comparison is most preferably conducted by the local homology algorithm of Smith & Waterman, Adv. Appl. Math. 2: 482 (1981).

[0069] As used herein, a “peptide” refers to an amino acid polymer containing between about 8 and about 12 amino acids linked together via peptide bonds. A peptide as used herein can comprise additional atoms beyond those of the 8 to twelve amino acids, so long as the peptide retains the ability to bind an MHC I receptor, e.g., an HLA-A2 receptor, and form a ternary complex with the T-cell receptor, the MHC I receptor, and the peptide.

[0070] Conservative substitution” refers to the substitution in a polypeptide of an amino acid with a functionally similar amino acid. The following six groups each contain amino acids that are conservative substitutions for one another:
[0071] Alanine (A), Serine (S), and Threonine (T)
[0072] Aspartic acid (D) and Glutamic acid (E)
[0073] Asparagine (N) and Glutamine (Q)
[0074] Arginine (R) and Lysine (K)
[0075] Isoleucine (I), Leucine (L), Methionine (M), and Valine (V)
[0076] Phenylalanine (F), Tyrosine (Y), and Tryptophan (W).

[0077] The term “about,” as used herein, unless otherwise indicated, refers to a value that is no more than 10% above or below the value being modified by the term. For example, the term “about 5 μg/kg” means a range of from 4.5 μg/kg to 5.5 μg/kg. As another example, “about 1 hour” means a range of from 48 minutes to 72 minutes. Where the term “about” modifies a value that must be an integer, and 10% above or below the value is not also an integer, the modified value should be rounded to the nearest whole number. For example, “about 12 amino acids” means a range of 11 to 13 amino acids.

[0078] The term “physiological conditions,” as used herein, refers to the salt concentrations normally observed in human serum. One skilled in the art will recognize that physiological conditions need not mirror the exact proportions of all ions found in human serum, rather, considerable adjustment can be made in the exact concentration of sodium, potassium, calcium, chloride, and other ions, while the overall ionic strength of the solution remains constant.

### 4.2 ANTIGENS ASSOCIATED WITH THERAPY WITH PROLIFERATION INCOMPETENT TUMOR CELLS THAT EXPRESS GM-CSF

[0079] In certain aspects as described below, provided herein are methods that comprise assessing immune responses against antigens associated with a likelihood of responsiveness to treatment with proliferation-incompetent tumor cells that express cytokines, e.g., GM-CSF. In some embodiments, the therapies are predicted to result in an improved therapeutic outcome for the subject, for example, a decrease in cancer-associated pain or improvement in the condition of the patient according to any clinically acceptable criteria, including but not limited to a decrease in metastases, an increase in life expectancy or an improvement in quality of life. The antigens may be expressed endogenously by cells native to the subject or may be exogenously provided to the subject by, e.g., the administered engineered tumor cells. The discussion below briefly describes examples of such antigens.

[0080] Coatomer binding complex (beta′-coat protein; coatomer subunit beta′; coatomer binding complex, beta prime subunit; coatomer protein complex, subunit beta; coatomer protein complex, subunit beta 2 (beta prime)) is one of the subunits of an oligomeric complex putatively involved in regulating membrane trafficking in the exocytic pathway. Coatomer binding complex (aliases include COPB2, Beta′-COP, beta′-COP, and p102) encodes a 102487 Da protein comprised of 906 amino acids (REFSEQ NP_{—}004757.1, SEQ ID NO: 1) that is encoded on chromosome 3 (Ensembl cytogenetic band: 3q23). A representative nucleotide sequence is NM_{—}004766.1 (SEQ ID NO: 2). COPB2 is part of a cytosolic protein complex constitutes the coat of nonclathrin-coated vesicles and is essential for Golgi budding and vesicular trafficking (Stenbeck et al., EMBO J. 12, 2841-2845 (1993); Harrison-Lavoie et al., EMBO J. 12, 2847-2853 (1993). Meta-analysis of DNA microarray data revealed that COPB2 is commonly activated in human cancer relative to respective normal tissue types (Rhodes and Chinnaiyan, Nat. Genet. 37, S31-37 (2005).

[0081] Glutamyl-prolyl tRNA synthetase (bifunctional aminoacyl-tRNA synthetase; multifunctional aminoacyl-tRNA synthetase; glutamate tRNA ligase; glutaminyl-tRNA synthetase; glutamyl-prolyl tRNA synthetase; proliferation-inducing protein; proline-tRNA ligase; prolyl-tRNA synthetase) is a component of the multisynthetase complex which is comprised of a bifunctional glutamyl-prolyl-tRNA synthetase, the monospecific isoleucyl, leucyl, glutaminyl, methionyl, lysyl, arginyl, and aspartyl-tRNA synthetases as well as three auxiliary proteins, p18, p48 and p43. Aliases for glutamyl-prolyl tRNA synthetase include EPRS, DKFZp313B047, EARS, GLNS, PARS, PIG32, QARS, and QPRS. EPRS encodes a 163026 Da protein comprised of 1440 amino acids (REFSEQ NP_{—}004437.2, SEQ ID NO: 3) that is encoded on chromosome 1 (Ensembl cytogenetic band: 1q41). A representative nucleotide sequence is NM_{—}004446.2 (SEQ ID NO: 4). Aminoacyl-tRNA synthetases are a class of enzymes that charge tRNAs with their cognate amino acids (Hirano, Arterioscler. Thromb. Vasc. Biol. 27, 27-36 (2007). The protein encoded by this gene is a multifunctional aminoacyl-tRNA synthetase that catalyzes the aminoacylation of glutamic acid and proline tRNA species (Fett and Knippers, J. Biol. Chem. 266, 1448-1455 (1991); Cerini et al., EMBO J. 10, 4267-4277 (1991)). Alternative splicing has been observed for this gene, but the full-length nature and biological validity of the variant have not been determined. Serological responses to EPRS have previously been observed in colon cancer patients (Line et al., Cancer Immunol. Immunother. 51, 574-582 (2002).

[0082] DEAD (Asp-Glu-Ala-Asp) box polypeptide 41 (DEAD box protein 41; DEAD box protein abstrakt homolog; DEAD-box protein abstract; probable ATP-dependent RNA helicase DDX41; putative RNA helicase) is a member of a diverse family of nuclear proteins involved in ATP-dependent RNA unwinding, needed in a variety of cellular processes including splicing, ribosome biogenesis and RNA degradation. Aliases for this gene include DDX41, 2900024F02Rik; ABS; EC 3.6.1.-; and MGC8828. The DDX41 gene encodes for a 622 amino acid protein of 69838 Da (REFSEQ NP_{—}057306.2, SEQ ID NO: 5). The gene is located on chromosome 5 (Ensembl cytogenetic band: 5q35.3), and a representative nucleotide sequence is NM_{—}016222.2 (SEQ ID NO: 6). DEAD box proteins, characterized by the conserved motif Asp-Glu-Ala-Asp (DEAD), are putative RNA helicases. They are implicated in a number of cellular processes involving alteration of RNA secondary structure, such as translation initiation, nuclear and mitochondrial splicing, and ribosome and spliceosome assembly. Based on their distribution patterns, some members of the DEAD box protein family are believed to be involved in embryogenesis, spermatogenesis, and cellular growth and division. This gene encodes a member of this family. The function of this member has not been determined. Based on studies in Drosophila, the abstract gene is widely required during post-transcriptional gene expression. See Irion and Leptin, Curr. Biol. 9, 1373-1381 (1999); Abdelhaleem, Clin. Biochem. 38, 499-503 (2005); Abdul-Ghani et al., J. Cell Physiol. 204, 210-218 (2005).

[0083] Interleukin-1 receptor associated kinase 4 (IRAK-4 mutated form; NY-REN-64 antigen 3) is required for the efficient recruitment of IRAK1 to the IL-1 receptor complex following IL-1 engagement, triggering intracellular signaling cascades leading to transcriptional up-regulation and mRNA stabilization. Common aliases for interleukin-1 receptor associated, kinase 4 include IRAK4, EC 2.7.11.1, IPD1, LOC51135, NY-REN-64, and REN64. The IRAK4 gene encodes for a 460 amino acid protein of 51530 Da (REFSEQ NP_{—}057207.1, SEQ ID NO: 7). The gene is located on chromosome 12 (Ensembl cytogenetic band: 12q12), and a representative nucleotide sequence is NM_{—}016123.1 (SEQ ID NO: 8). The interleukin-1 receptor associated kinases (e.g., IRAK4) are important mediators in the signal transduction of Toll-like receptor (TLR) and IL1R family members. Thus IRAK-4 plays a critical role in IL-1 receptor (IL-1R)/TLR7-mediated induction of inflammatory responses. See Burns et al., J. Exp. Med. 20, 197, 263-268 (2003); Suzuki et al., Science 311, 1927-1932 (2006); Koziczak-Holbro et al., J. Biol. Chem. 282, 13552-13560 (2007); Li et al., Proc. Natl. Acad. Sci. U.S.A. 99, 5567-5572 (2002).

[0084] Cytosolic malate dehydrogenase (malate dehydrogenase, cytoplasmic; malate dehydrogenase 1, NAD (soluble); soluble malate dehydrogenase) is important in transporting NADH equivalents across the mitochondrial membrane, controlling tricarboxylic acid (TCA) cycle pool size and providing contractile function (Lo et al., J. Cell Biochem. 94, 763-773 (2005). The synonyms for cytosolic malate dehydrogenase include MDH1, MDHA, MOR2, MDH-s, MGC:1375, and EC 1.1.1.37. MDH1 encodes a 36426 Da cytoplasmic protein comprised of 334 amino acids (REFSEQ NP_{—}005908.1, SEQ ID NO: 9). The genomic location of MDH1 is chromosome 2 (Ensembl cytogenetic band: 2p15), and a representative nucleotide sequence is NM_{—}005917.2 (SEQ ID NO: 10). Malate dehydrogenase catalyzes the reversible oxidation of malate to oxaloacetate, utilizing the NAD/NADH cofactor system in the citric acid cycle. The protein encoded by this gene is localized to the cytoplasm and may play pivotal roles in the malate-aspartate shuttle that operates in the metabolic coordination between cytosol and mitochondria (Friedrich et al., Biochem. Genet. 25, 657-669 (1987); Friedrich et al., Ann Hum Genet. 52, 25-37 (1988)). MDH1 was found to be overexpressed in null cell adenomas compared to normal pituitary by expressed sequence tag sequencing and cDNA microarray analysis (Hu et al., Pituitary 10, 47-52 (2007).

[0085] The H1 histone family, member 2 (histone H1.2; histone H1d; histone 1, H1c; histone cluster 1, H1c) is also referred to by the aliases HIST1H1C, H1.2, H1F2, and MGC3992. Histones are necessary for the condensation of nucleosome chains into higher order structures. HIST1H1C encodes a nuclear protein 21365 Da in size encoded by 213 amino acids (REFSEQ NP_{—}005310.1, SEQ ID NO: 11). The genomic location of HIST1H1C is chromosome 6 (Ensembl cytogenetic band: 6p22.2), and a representative nucleotide sequence is NM_{—}005319.3 (SEQ ID NO: 12). Histones are basic nuclear proteins responsible for nucleosome structure of the chromosomal fiber in eukaryotes. Two molecules of each of the four core histones (H2A, H2B, H3, and H4) form an octamer, around which approximately 146 by of DNA is wrapped in repeating units, called nucleosomes. The linker histone, H1, interacts with linker DNA between nucleosomes and functions in the compaction of chromatin into higher order structures. This gene is intronless and encodes a member of the histone H1 family. Transcripts from this gene lack polyA tails but instead contain a palindromic termination element. This gene is found in the large histone gene cluster on chromosome 6. See Ohe et al., J. Biochem. 106, 844-857 (1989); Eick et al., Eur. J. Cell Biol. 49, 110-115 (1989).

[0086] Zuotin related factor 1 (DnaJ homolog subfamily C member 2; m-phase phosphoprotein 11) is also known by the synonyms ZRF1, zuotin, ZUO1, MPP11, MPHOSPH11, and DNAJC2. ZRF1 is comprised of 621 amino acids, and encodes for a 71897 Da protein (REFSEQ NP_{—}055192.1, SEQ ID NO: 13). A representative nucleotide sequence is NM_{—}014377.1 (SEQ ID NO: 14), located on chromosome 7 (Ensembl cytogenetic band: 7q22.1). ZRF1 is a member of the M-phase phosphoprotein (MPP) family, and encodes a phosphoprotein with a J domain and a Myb DNA-binding domain which localizes to both the nucleus and the cytosol. The protein is capable of forming a heterodimeric complex that associates with ribosomes, acting as a molecular chaperone for nascent polypeptide chains as they exit the ribosome. This protein was identified as a leukemia-associated antigen and expression of the gene is upregulated in leukemic blasts. Also, chromosomal aberrations involving this gene are associated with primary head and neck squamous cell tumors. This gene has a pseudogene on chromosome 6. Alternatively spliced variants which encode different protein isoforms have been described; however, not all variants have been fully characterized. See Otto et al., Proc. Natl. Acad. Sci. U.S.A. 102, 10064-10069 (2005); Greiner et al., Int. J. Cancer 108, 704-711 (2004); Greiner et al., Int. J. Cancer 106, 224-231 (2003); Resto et al., Cancer Res. 60, 5529-5535 (2000); Matsumoto-Taniura et al., Mol. Biol. Cell 7, 1455-1469 (1996).

[0087] DNA topoisomerase 2-beta (DNA topoisomerase II beta; DNA topoisomerase II, 180 kD; DNA topoisomerase II, beta isozyme; U937 associated antigen; antigen MLAA-44) is a ubiquitous ATPase component of the topoisomerase II involved in the breakage and rejoining of double strand of DNA. Aliases for this gene include TOP2B, TOPIIB, top2beta, and EC 5.99.1.3. TOP2B is comprised of 1626 amino acids, and encodes for a 183267 Da protein (REFSEQ NP_{—}001059.2, SEQ ID NO: 15). A representative nucleotide sequence is NM_{—}001068.2 (SEQ ID NO: 16), located on chromosome 3 (Ensembl cytogenetic band: 3p24.2). TOP2B encodes a DNA topoisomerase, an enzyme that controls and alters the topologic states of DNA during transcription. This nuclear enzyme is involved in processes such as chromosome condensation, chromatid separation, and the relief of torsional stress that occurs during DNA transcription and replication. It catalyzes the transient breaking and rejoining of two strands of duplex DNA which allows the strands to pass through one another, thus altering the topology of DNA. Two forms of this enzyme exist as likely products of a gene duplication event. The gene encoding this form, beta, is localized to chromosome 3 and the alpha form is localized to chromosome 17. The gene encoding this enzyme functions as the target for several anticancer agents and a variety of mutations in this gene have been associated with the development of drug resistance. Reduced activity of this enzyme may also play a role in ataxia-telangiectasia. Alternative splicing of this gene results in two transcript variants; however, the second variant has not yet been fully described. See Mimeault et al., Int. J. Cancer. 120, 160-9 (2007); Chikamori et al., Leukemia 20, 1809-1818 (2006); Austin et al., Biochim. Biophys. Acta 1172, 283-291 (1993); Jenkins et al., Nucleic Acids Res. 20, 5587-5592 (1992); Tan et al., Cancer Res. 52, 231-234 (1992); Austin and Fisher, FEBS Lett. 266, 115-117 (1990); Chung et al., Proc Natl. Acad. Sci. U.S.A. 86, 9431-9435 (1989).

[0088] A kinase (PRKA) anchor protein (A-kinase anchor protein 350 kDa; A-kinase anchor protein 450 kDa; centrosome- and golgi-localized PKN-associated protein; protein hyperion; protein yotiao; AKAP9-BRAF fusion protein; AKAP120-like protein) has a number of aliases, including AKAP9, AKAP350, AKAP450, CG-NAP, HYPERION, KIA0803, and yotiao. AKAP9 may be required to maintain the integrity of the Golgi apparatus, and one of the isoforms of may play a role in the organization of postsynaptic specializations. There are at least 6 isoforms of AKAP9 produced by alternative splicing, including REFSEQ NP_{—}005742.4, NP_{—}671695.1, NP_{—}671700.1, NP_{—}671714.1 (SEQ ID NOS: 17-20). The consensus sequence of AKAP9 is comprised of 3911 amino acids, and encodes for a 453667 Da protein. Representative nucleotide sequences for some of the isoforms are NM_{—}005751.3, NM_{—}147166.1, NM_{—}147171.1, NM_{—}147185.1 (SEQ ID NOS: 21-24), located on chromosome 7 (Ensembl cytogenetic band: 7q21.2). The A-kinase anchor proteins (AKAPs) are a group of structurally diverse proteins which have the common function of binding to the regulatory subunit of protein kinase A (PKA) and confining the holoenzyme to discrete locations within the cell. Alternate splicing of this gene results in many isoforms that localize to the centrosome and Golgi apparatus. These isoforms interact with numerous signaling proteins from multiple signal transduction pathways, including type II protein kinase A, serine/threonine kinase protein kinase N, protein phosphatase 1, protein phosphatase 2a, protein kinase C-epsilon and phosphodiesterase 4D3. Oncogenic fusions between AKAP9 and BRAF have also been observed in thyroid papillary carcinomas. See Westphal et al., Science 285, 93-96 (1999); Takahashi et al., J. Biol. Chem. 274, 17267-17274 (1999); Witczak et al., EMBO J. 18, 1858-1868 (1999); Schmidt et al., J. Biol. Chem. 274, 3055-3066 (1999); Lin et al., J. Neurosci. 18, 2017-2027 (1998); E1 Din El Homasany et al., J. Immunol. 175, 7811-7818 (2005); Clampi et al., J. Clin. Invest. 115, 20-23 (2005).

[0089] Transmembrane protein 33 is also know by the aliases TMEM33 and DB83, and was identified by tandem mass spectrometry of melanosome proteomes at various developmental stages (Chi et al., J Proteome Res. 5, 3135-3144 (2006); Ewing et al., Mol Syst Biol. 3, 89 (2007)). The function of TMEM33 is not known. The TMEM33 gene encodes for a 247 amino acid protein of 27978 Da (REFSEQ NP_{—}060596.1, SEQ ID NO: 25). The gene is located on chromosome 4 (Ensembl cytogenetic band: 4p13), and a representative nucleotide sequence is NM_{—}018126.1 (SEQ ID NO: 26).

[0090] SET domain containing 1B (SET domain-containing protein 1B -Fragment SETD1B) is also known by the synonyms SETD1B, F1120803, and KIAA1076. SETD1B was derived by automated computational analysis using the GNOMON gene prediction method with supporting evidence based on sequence similarity to 4 mRNAs, 94 ESTs, and 6 proteins (Kikuno et al., DNA Res. 6, 197-205 (1999)). The gene product of SETD1B is similar to SET domain containing 1A and has no known function. The SETD1B gene encodes for a 2037 amino acid protein of 221106 Da (REFSEQ XP_{—}037523.11, SEQ ID NO: 27). The gene is located on chromosome 12 (Ensembl cytogenetic band: 12q24.31), and a representative nucleotide sequence is XM_{—}037523 (SEQ ID NO: 28).

[0091] The first third of B double prime 1, subunit of RNA polymerase III transcription initiation factor IIIB (BDP1; mRNAB double prime 1, subunit of RNA polymerase III transcription initiation factor IIIB; TFC5; TFNR; TAF3B1; KIAA1241; KIAA1689; TFIIIB; TFIIIB90; HSA238520; TFIIIB150; DKFZp686K0831; DKFZp686C01233; transcription factor-like nuclear regulator; TATA box binding protein (TBP)-associated factor; RNA polymerase III, GTF3B subunit 1; transcription factor IIIB 150; RNA polymerase III transcription initiation factor B″) encodes a subunit of the RNA polymerase III (Pol III) transcription factor complex. The BDP1 gene encodes for a 2624 amino acid protein of 293755 Da (REFSEQ NP_{—}060899.2, SEQ ID NO: 29). The gene is located on chromosome 5 (Ensembl cytogenetic band: 5q13.2), and a representative nucleotide sequence is NM_{—}018429.2 (SEQ ID NO: 30). The product of this gene is a subunit of the TFIIIB transcription initiation complex, which recruits RNA polymerase III to target promoters in order to initiate transcription. The encoded protein localizes to concentrated aggregates in the nucleus, and is required for transcription from all three types of polymerase III promoters. It is phosphorylated by casein kinase II during mitosis, resulting in its release from chromatin and suppression of polymerase III transcription. See Johnson et al., Mol. Cell. 26, 367-379 (2007); Schoenen et al., Biol. Chem. 387, 277-284 (2006); Hu et al., Mol. Cell. 16, 81-92 (2004); Weser et al., J. Biol. Chem. 279, 27022-27029 (2004); Fairley et al., EMBO J. 22, 5841-5850 (2003); Hu et al., Mol. Cell. 12, 699-709 (2003); Kelter et al., Genomics 70, 315-326 (2000); Schramm et al., Genes Dev. 14, 2650-2663 (2000); Chu et al., J. Biol. Chem. 272, 14755-14761 (1997); Wang et al., Genes Dev. 11, 1315-1326 (1997).

[0092] Centrosomal protein 290 kDa (CTCL tumor antigen se2-2; prostate cancer antigen T21; nephrocystin 6; monoclonal antibody 3H11 antigen; nephrocytsin-6; Joubert syndrome 5; nephrocystin-6) is required for the correct localization of ciliary and phototransduction proteins in retinal photoreceptor cells, and may play a role in ciliary transport processes. Synonyms for centrosomal protein 290 kDa include MKS4, rd16, JBTS5, JBTS6, LCA10, NPHP6, SLSN6, 3H11Ag, FLJ13615, FLJ21979, and KIAA0373. CEP290 encodes a 290386 Da protein comprised of 2479 amino acids (REFSEQ NP_{—}079390.3, SEQ ID NO: 31) that is encoded on chromosome 12 (Ensembl cytogenetic band: 12q21.32). A representative nucleotide sequence is NM_{—}025114.3 (SEQ ID NO: 32). CEP290 encodes a protein with 13 putative coiled-coil domains, a region with homology to SMC chromosome segregation ATPases, six KID motifs, three tropomyosin homology domains, and an ATP/GTP binding site motif A. The protein is localized to the centrosome and cilia and has sites for N-glycosylation, tyrosine sulfation, phosphorylation, N-myristoylation, and amidation. Mutations in this gene have been associated with Joubert syndrome and nephronophthisis and the presence of antibodies against this protein is associated with several forms of cancer. See Perrault et al., Hum. Mutat. 28, 416 (2007); Olsen et al., Cell 127, 635-648 (2006); den Hollander et al., Am. J. Hum. Genet. 79, 556-561 (2006); Sayer et al., Nat. Genet. 38, 674-681 (2006); Valente et al., Nat. Genet. 38, 623-625 (2006); Guo et al., Biochem. Biophys. Res. Commun. 324, 922-930 (2004); Andersen et al., Nature 426, 570-574 (2003); Shin et al., J. Biol. Chem. 278, 7607-7616 (2003); Eichmuller et al., Proc. Natl. Acad. Sci. U.S.A. 98, 629-634 (2001); Chen et al., Biochem. Biophys. Res. Commun. 280, 99-103 (2001).

[0093] AHNAK nucleoprotein 2 (AHNAK nucleoprotein (desmoyokin); neuroblast differentiation-associated protein AHNAK) is also known by the aliases AHNAK, AHNAKRS, and desmoyokin. AHNAK is a ubiquitously expressed giant phosphoprotein that was initially identified as a gene product subject to transcriptional repression in neuroblastoma. The AHNAK gene is located on chromosome 11 (Ensembl cytogenetic band: 11q12.3), and encodes for at least two transcripts whose representative nucleotide sequences are NM_{—}001620.1 (SEQ ID NO: 33) and NM_{—}024060.2 (SEQ ID NO: 34). The larger of these transcripts encodes for a 5890 amino acid protein of 628973 Da (REFSEQ NP_{—}001611, SEQ ID NO: 35). AHNAK encodes an unusually large protein that is expressed by means of a 17.5-kilobase mRNA in diverse cellular lineages, but is typically repressed in cell lines derived from human neuroblastomas and in several other types of tumors. AHNAK is implicated in calcium flux regulation and has emerged as an important signaling molecule in a wide range of physiological activities. AHNAK is critical for cardiac Ca(V)1.2 calcium channel function and its beta-adrenergic regulation. AHNAK was also identified as a potential diagnostic marker for ovarian cancer. See De Seranno et al., J. Biol. Chem. 281, 35030-35038 (2006); Haase et al., FASEB J. 19, 1969-1977 (2005); Lee et al., J. Biol. Chem. 279, 26645-26653 (2004); Sussman et al., J. Cell. Biol. 154, 1019-1030 (2001); Gentil et al., J. Biol. Chem. 276, 23253-23261 (2001); Kudoh et al., Cytogenet. Cell Genet. 70, 218-220 (1995); Shtivelman et al., Proc. Natl. Acad. Sci. U.S.A. 89, 5472-5476 (1992); Chatterjee et al., Cancer Res. 66, 1181-1190 (2006).

[0094] PDGFA associated protein 1 (PDGF associated protein) is also known by the aliases PDAP1, PAP, PAP1, and HASPP28. The PDAP1 gene encodes for a 181 amino acid protein of 20630 Da (REFSEQ NP_{—}055706.1, SEQ ID NO: 36). The gene is located on chromosome 7 (Ensembl cytogenetic band: 7q22.1), and a representative nucleotide sequence is NM_{—}014891.5 (SEQ ID NO: 37). PDAP1 is a novel mitogen-associated protein that was isolated from a rat neural retina cell line. The protein co-purified with platelet-derived growth factor (PDGF)-A. PDAP1 binds to PDGF with low affinity and enhances the mitogenic effect of PDGF-A, but lowers the mitogenic activity of PDGF-B. PDAP1 is expressed in the brain of newborn rats and is found in several other tissues. See LaRochelle et al., Nat. Cell Biol. 3, 517-521 (2001); Fischer et al., J. Neurochem. 66, 2213-2216 (1996).

[0095] Leucine zipper and CTNNBIP1 domain-containing protein (LZIC; leucine zipper and ICAT homologous domain-containing protein; MGC15436) encodes for a 191 amino acid protein of 21495 Da (REFSEQ NP_{—}115744.2, SEQ ID NO: 38). The gene is located on chromosome 1 (Ensembl cytogenetic band: 1p36.22), and a representative nucleotide sequence is NM_{—}032368.3 (SEQ ID NO: 39). The major 5.2-kb LZIC mRNA and minor 2.1-, 1.6-, and 1.0-kb LZIC mRNAs are expressed almost ubiquitously in normal human tissues. LZIC is also expressed in numerous cancer cell lines, and is significantly up-regulated in the gastric cancer cell line MKN74 and 5 cases of primary gastric cancer. As LZIC contains ICAT homologous domain, LZIC might inhibit the interaction between beta-catenin and TCF transcription factors, and up-regulation of LZIC in gastric cancer might be due to a negative feed-back mechanism to inhibit the WNT-beta-catenin-TCF signaling pathway. See Katoh et al., Int. J. Mol. Med. 8, 611-615 (2001).

[0096] Zinc finger protein 397 (zinc finger and SCAN domain-containing protein 15; zinc finger protein 47) is also known by the synonyms ZNF397, 2810411K16Rik, ZNF47, and ZSCAN15, and MGC13250. ZNF397 encodes a 61139 Da protein comprised of 534 amino acids (REFSEQ NP_{—}115723.1, SEQ ID NO: 40) that is encoded on chromosome 18 (Ensembl cytogenetic band: 18q12.2). A representative nucleotide sequence is NM_{—}032347.1 (SEQ ID NO: 41). Four isoforms of ZNF397 transcript, 1.7, 2.5, 7.0 and 9.0-kb, are expressed in a variety of tissues, with varying levels. The SCAN-(C(2)H(2))(X) genes encode two distinct proteins due to a unique alternative splicing mechanism. ZNF397-fu (full zinc fingers) consists of a SCAN domain in the N-terminal region and many consecutive C(2)H(2) zinc finger repeats in the C-terminal region. ZNF397-nf (no zinc fingers) encodes 198 amino acids containing the SCAN domain only. ZNF397-fu or ZNF397-nf can homo-associate, and ZNF397-fu hetero-associates with ZNF397-nf. ZNF397-nf polypeptides are expressed diffusely in the cells, while ZNF397-fu polypeptides target specifically to the nuclei. ZNF397-nf can repress reporter gene transcription, with ZNF397-nf having the strongest repression activity. Deletion analysis revealed that ZNF397-fu is a transcriptional activator without its nine zinc finger repeats. See Wu et al., Gene 310, 193-201 (2003); Lichter et al., Genomics 13, 999-1007 (1992).

[0097] Structural maintenance of chromosomes 1A (structural maintenance of chromosomes 1, yeast-like 1; segregation of mitotic chromosomes 1; SMC1 alpha protein) is also known by the synonyms SMC1A, SMC1, SMCB, CDLS2, SB1.8, SMC1L1, DXS423E, KIAA0178, MGC138332, SMC1alpha, and DKFZp686L19178. Proper cohesion of sister chromatids is a prerequisite for the correct segregation of chromosomes during cell division. The cohesin multiprotein complex is required for sister chromatid cohesion. This complex is composed partly of two structural maintenance of chromosomes (SMC) proteins, SMC3 and either SMC1L2 or the protein encoded by this gene. Most of the cohesin complexes dissociate from the chromosomes before mitosis, although those complexes at the kinetochore remain. Therefore, the encoded protein is thought to be an important part of functional kinetochores. In addition, this protein interacts with BRCA1 and is phosphorylated by ATM, indicating a potential role for this protein in DNA repair. This gene, which belongs to the SMC gene family, is located in an area of the X-chromosome that escapes X inactivation. SMC1A is comprised of 1233 amino acids, and encodes for a 143233 Da protein (REFSEQ NP_{—}006297.2, SEQ ID NO: 42). A representative nucleotide sequence is NM_{—}006306.2 (SEQ ID NO: 43), located on chromosome X (Ensembl cytogenetic band: Xp11.22). Defects in SMC are the cause of X-linked Cornelia de Lange syndrome [MIM:300590]. Cornelia de Lange syndrome is a clinically heterogeneous developmental disorder associated by malformations affecting multiple systems. Cornelia de Lange is characterized by facial dysmorphisms, upper limb abnormalities, growth delay and cognitive retardation. Mutations in the NIPBL gene, a component of the cohesin complex, account for approximately half of the affected individuals. Mutations in the SMC1A, which encodes a different subunit of the cohesin complex, are responsible for an X-linked form of the disorder. See Deardorff et al., Am. J. Hum. Genet. 80, 485-494 (2007); Schoumans et al., Eur. J. Hum. Genet. 15, 143-149 (2007); Inoue et al., Biochem. J. 398, 125-133 (2006); Musio et al., Nat. Genet. 38, 528-530 (2006); Ryu et al., Biochem. Biophys. Res. Commun. 341, 770-775 (2006); Yazdi et al., Genes Dev. 16, 571-582 (2002); Schmiesing et al., Proc. Natl. Acad. Sci. U.S.A. 95 (22), 12906-12911 (1998).

[0098] The MYO18A gene has previously been described as molecule associated with JAK3 N-terminus, myosin containing a PDZ domain, SP-A receptor subunit SP-R210 alphaS, myosin 18A, myosin XVIIIA, myosin containing PDZ domain. Aliases for MYO18A include DKFZp686L0243, MAJN, MYSPDZ, MysPDZ, SPR210, myosin XVIIIA, KIAA0216, and TIAF1. There are two isoforms of MYO18A, one that is localized to the endoplasmic reticulum-golgi intermediate compartment (by similarity), and a second isoform that is localized to the cytoplasm. Isoform 1 colocalizes with actin, whereas isoform 2 lacks the PDZ domain and is diffusely localized in the cytoplasm. The amino acid sequences for these isoforms are REFSEQ NP_{—}510880.2 (SEQ ID NO: 44) and REFSEQ NP_{—}976063.1 (SEQ ID NO: 45). MYO18A is encoded on chromosome 17 (Ensembl cytogenetic band: 17q11.2), and representative nucleotide sequences are NM_{—}078471.3 (SEQ ID NO: 46) and NM_{—}203318.1 (SEQ ID NO: 47). MYO18A is an unconventional myosin belonging to the class XVIII myosin containing a KE (lysine and glutamine)-rich domain and a PDZ domain, which codistributes with actin fibers partially without any canonical actin binding sequence in its myosin head domain. Thus this gene appears to be involved in the maintenance of the stromal cell architectures required for cell to cell contact. See Mori et al., J. Biochem. 133, 405-413 (2003); Ji et al., Biochem. Biophys. Res. Commun. 270, 267-271 (2000); Chang et al., Biochem. Biophys. Res. Commun. 253, 743-749 (1998); Chroneos et al., J. Biol. Chem. 271, 16375-16383 (1996); Yang et al., J. Biol. Chem. 280, 34447-34457 (2005); Kim et al., J. Proteome Res. 4, 1339-1346 (2005); Isogawa et al., Biochemistry 44, 6190-6196 (2005); Homma et al., J. Mol. Biol. 343 (5), 1207-1220 (2004).

[0099] The PALLD gene has been described as PALLD protein-fragment 4; pancreatic cancer, susceptibility to; palladin, cytoskeletal associated protein; and sarcoma antigen NY-SAR-77 and has numerous synonyms, including CGI-151, FLJ22190, FLJ38193, FLJ39139, KIAA0992, PNCA1, SIH002, and palladin. PALLD is comprised of 510 amino acids, and encodes for a 57061 Da protein (REFSEQ NP_{—}057165.3, SEQ ID NO: 48). A representative nucleotide sequence is NM_{—}016081.3 (SEQ ID NO: 49), located on chromosome 4 (Ensembl cytogenetic band: 4q32.3). PALLD is a major component of stress fiber dense bodies, cardiomyocyte Z-discs, and neuronal synapses. It functions as a structural molecule, cytoskeletal regulator, and docking site to other proteins. Both antisense and transient overexpression experiments have shown that PALLD plays an important role in the regulation of actin cytoskeleton. The function of PALLD is context dependent and plays a critical role in cytoskeletal remodeling, for example responding to signals induced by vascular injury as well as signals that induce smooth muscle cell hypertrophy, such as angiotension II. PALLD RNA was overexpressed in the tissues from precancerous dysplasia and pancreatic adenocarcinoma in both the familial and the sporadic disease. See Jin et al., Circ. Res. 100, 817-825 (2007); Pogue-Geile et al., PLoS Med. 3, E516 (2006); Boukhelifa et al., FEBS J. 273, 26-33 (2006); Ronty et al., Exp. Cell Res. 310, 88-98 (2005); Eberle et al., Am. J. Hum. Genet. 70, 1044-1048 (2002); Mykkanen et al., Mol. Biol. Cell 12, 3060-3073 (2001); Bang et al., J. Cell Biol. 153, 413-427 (2001); Parast and Otey, J. Cell Biol. 150, 643-656 (2000).

[0100] Spindle assembly abnormal protein is also known by the aliases SASS6, DKFZp761A078, FLJ22097, HsSAS-6, MGC119440, and SAS6. SASS6 is a coiled-coil protein that is recruited to centrioles at the onset of the centrosome duplication cycle, and is required for daughter centriole formation. SASS6 is comprised of 657 amino acids, and encodes for a 74397 Da protein (REFSEQ NP_{—}919268.1, SEQ ID NO: 50). A representative nucleotide sequence is NM_{—}194292.1 (SEQ ID NO: 51), located on chromosome 1 (Ensembl cytogenetic band: 1p21.2). See Leidel et al., Nat. Cell Biol. 7, 115-125 (2005); Dammermann et al., Dev. Cell 7, 815-829; Andersen et al., Nature 426, 570-574 (2003).

[0101] Phosphoserine aminotransferase 1 is also known by the synonyms PSAT1, EC 2.6.1.52, MGC1460, PSA, and PSAT. PSAT1 is the second step-catalyzing enzyme in the serine biosynthetic pathway in mammals and catalyzes the formation of phosphoserine from phosphohydroxypyruvate. The consensus PSAT1 sequence is comprised of 370 amino acids, and encodes for a 40423 Da protein. Two different isoforms of PSAT1 have been identified, alpha and beta, which differ in that PSAT alpha lacks an internal exon, but maintains the same reading frame. Reference amino acid sequences for these proteins are REFSEQ NP_{—}478059.1 (SEQ ID NO: 52) and REFSEQ NP_{—}066977.1 (SEQ ID NO: 53). Representative nucleotide sequences are NM_{—}058179.2 (SEQ ID NO: 54) and NM_{—}021154.3 (SEQ ID NO: 55), located on chromosome 9 (Ensembl cytogenetic band: 9q21.31). See Baek et al., Biochem. J. 373, 191-200 (2003); Basurko et al., IUBMB Life 48, 525-529 (1999); Misrahi et al., Biochemistry 26, 3975-3982 (1987).

[0102] Valosin-containing protein (VCP) is a member of a family that includes putative ATP-binding proteins involved in vesicle transport and fusion, 26S proteasome function, and assembly of peroxisomes. VCP, as a structural protein, is associated with clathrin, and heat-shock protein Hsc70, to form a complex. VCP has been implicated in a number of cellular events that are regulated during mitosis, including homotypic membrane fusion, spindle pole body function, and ubiquitin-dependent protein degradation.valosin-containing protein. VCP has also been described as yeast Cdc48p homolog and transitional endoplasmic reticulum ATPase, as well as the aliases IBMPFD, MGC1311997, MGC148092, MGC8560, TERA, and p97. VCP is comprised of 806 amino acids, and encodes for a 89322 Da protein (REFSEQ NP_{—}009057.1, SEQ ID NO: 56). A representative nucleotide sequence is NM_{—}007126.2 (SEQ ID NO: 57), located on chromosome 9 (Ensembl cytogenetic band: 9p13.3). VCP is necessary for the fragmentation of Golgi stacks during mitosis and for their reassembly after mitosis. VCP is also involved in the formation of the transitional endoplasmic reticulum (tER). The transfer of membranes from the endoplasmic reticulum to the Golgi apparatus occurs via 50-70 nm transition vesicles which derive from part-rough, part-smooth transitional elements of the endoplasmic reticulum (tER). Vesicle budding from the tER is an ATP-dependent process. The ternary complex containing UFD1L, VCP and NPLOC4 binds ubiquitinated proteins and is necessary for the export of misfolded proteins from the ER to the cytoplasm, where they are degraded by the proteasome. The NPLOC4-UFD 1 L-VCP complex appears to regulate spindle disassembly at the end of mitosis and is necessary for the formation of a closed nuclear envelope. See Zhang et al., Biochem. Biophys. Res. Commun. 356, 536-541 (2007); Rothballer et al., FEBS Lett. 581, 1197-1201 (2007); Qiu et al., Am. J. Pathol. 170, 152-159 (2007); Wojcik et al., Mol. Biol. Cell 17, 4606-4618 (2006); Mimnaugh et al., Mol. Cancer. Res. 4, 667-681 (2006); Zhang et al., J. Biol. Chem. 274, 17806-17812 (1999); Hoyle et al., Mamm. Genome 8, 778-780 (1997); Druck et al., Genomics 30, 94-97 (1995); Pleasure et al., Nature 365 (6445), 459-462 (1993).

[0103] Aliases for bromodomain adjacent to zinc finger domain 2B include BAZ2B, WALp4, FLJ45644, DKFZP434H071, DKFZp76210516, KIAA1476, and FLJ45644. BAZ2B encodes a 1972 amino acid protein of 220710 Da in size (REFSEQ NP_{—}038478.2, SEQ ID NO: 58). The genomic location of BAZ2B is chromosome 2 (Ensembl cytogenetic band: 2q24.2), and a representative nucleotide sequence is NM_{—}013450.2 (SEQ ID NO: 59). Although the function of BAZ2B is not known, the bromodomain is a structural motif characteristic of proteins involved in chromatin-dependent regulation of transcription. Bromodomain proteins have been identified as integral components of chromatin remodeling complexes and frequently possess histone acetyltransferase activity. See Jones et al., Genomics 63, 40-45 (2000).

[0104] GTPase activating Rap/RanGAP domain-like 1 has also been described as GTPase activating RANGAP domain-like 1 and tuberin-like protein 1. Synonyms for this protein include GARNL1, GRIPE, TULIP1, KIAA0884, DKFZp566D133, and DKFZp667F074. There are at least 2 alternative transcripts for GARNL1 (NP_{—}055805.1 (SEQ ID NO: 60) and NP_{—}919277.2 (SEQ ID NO: 61) encoded by the representative nucleotide sequences NM_{—}014990.1 (SEQ ID NO: 62) and NM_{—}194301.2 (SEQ ID NO: 63). The consensus sequence encodes for a 2036 amino acid protein of 229832 Da. The genomic location of GARNL1 is chromosome 14 (Ensembl cytogenetic band: 14q13.2). GARNL1 interacts with the transcription factor TCF3/isoform E12 in the developing embryonic forebrain, and may be an important transcriptional regulator of downstream target genes under the control of TCF3/E12 by disrupting HLH dimer formation of TCF3/E12 with other proteins. These data suggest that GARNL1 plays a role in neuronal differentiation. See Schwarzbraun et al., Genomics 84, 577-586 (2004); Heng and Tan, J. Biol. Chem. 277, 43152-43159 (2002).

[0105] Nucleosome assembly protein 1-like 1 (HSP22-like protein interacting protein; NAP-1 related protein) is also known by the aliases NAP1L1, NRP, NAP1, NAP1L, MGC8688, FLJ16112, and MGC23410. There are at least 2 alternative transcripts for NAP1L1 (NP_{—}004528.1 (SEQ ID NO: 64) and NP_{—}631946.1 (SEQ ID NO: 65) encoded by the representative nucleotide sequences NM_{—}004537.3 (SEQ ID NO: 66) and NM_{—}139207.1 (SEQ ID NO: 67). The consensus sequence encodes for a 391 amino acid protein of 45374 Da. The genomic location of NAP1L1 is chromosome 12 (Ensembl cytogenetic band: 12q21.2). This gene encodes a member of the nucleosome assembly protein (NAP) family. This protein participates in DNA replication and may play a role in modulating chromatin formation and contribute to the regulation of cell proliferation. Alternative splicing of this gene results in several transcript variants; however not all have been fully described. NAP1L1 was also shown to be over-expressed in small-intestinal carcinoid neoplasia. See Eckey et al., Mol. Cell. Biol. 27, 3557-3568 (2007); Rehtanz et al., Mol. Cell. Biol. 24, 2153-2168 (2004); Asahara et al., Mol. Cell. Biol. 22, 2974-2983 (2002); Simon et al., Biochem. 1 297, 389-397 (1994); Kidd et al., Ann. Surg. Oncol. 13, 253-262 (2006).

[0106] Synonyms for paraneoplastic neuronal antigen MA1 (neuron- and testis-specific protein 1, and 37 kDa neuronal protein) include PNMA1 and MA1. PNMA1 encodes a 353 amino acid protein of 39761 Da in size (REFSEQ NP_{—}006020.4, SEQ ID NO: 68). The genomic location of BAZ2B is chromosome 14 (Ensembl cytogenetic band: 14q24.3), and a representative nucleotide sequence is NM_{—}006029.4 (SEQ ID NO: 69). PNMA1 was identified as neuronal auto-antigen identified using sera from patients with paraneoplastic neurological syndromes. The function of PNMA1 is not known. See Dalmau et al., Brain 122, 27-39 (1999).

[0107] Heterogeneous nuclear ribonucleoprotein A1 (helix-destabilizing protein; single-strand DNA-binding protein UP1; single-strand RNA-binding protein; heterogeneous nuclear ribonucleoprotein A1; heterogeneous nuclear ribonucleoprotein A1B; heterogeneous nuclear ribonucleoprotein B2; hnRNP core protein A1) is also known by the aliases HNRPA1, HNRNPA1, and MGC102835. There are at least 2 alternative transcripts for HNRPA1 (NP_{—}002127.1 (SEQ ID NO: 70) and NP_{—}112420.1 (SEQ ID NO: 71) encoded by the representative nucleotide sequences NM_{—}002136.2 (SEQ ID NO: 72) and NM_{—}031157.2 (SEQ ID NO: 73). The consensus sequence encodes for a 372 amino acid protein of 38846 Da. The genomic location of HNRPA1 is chromosome 12 (Ensembl cytogenetic band: 12q13.13). This gene belongs to the A/B subfamily of ubiquitously expressed heterogeneous nuclear ribonucleoproteins (hnRNPs). The hnRNPs are RNA binding proteins and they complex with heterogeneous nuclear RNA (hnRNA). These proteins are associated with pre-mRNAs in the nucleus and appear to influence pre-mRNA processing and other aspects of mRNA metabolism and transport. While all of the hnRNPs are present in the nucleus, some seem to shuttle between the nucleus and the cytoplasm. The hnRNP proteins have distinct nucleic acid binding properties. The protein encoded by this gene has two repeats of quasi-RRM domains that bind to RNAs. It is one of the most abundant core proteins of hnRNP complexes and it is localized to the nucleoplasm. This protein, along with other hnRNP proteins, is exported from the nucleus, probably bound to mRNA, and is immediately re-imported. Its M9 domain acts as both a nuclear localization and nuclear export signal. The encoded protein is involved in the packaging of pre-mRNA into hnRNP particles, transport of poly A+mRNA from the nucleus to the cytoplasm, and may modulate splice site selection. It is also thought have a primary role in the formation of specific myometrial protein species in parturition. Multiple alternatively spliced transcript variants have been found for this gene but only two transcripts are fully described. These variants have multiple alternative transcription initiation sites and multiple polyA sites. See Lewis et al., Mol. Biol. Cell 18, 1302-1311 (2007); Kim et al., J. Virol. 81, 3852-3865 (2007); Yang et al., Endocrinology 148, 1340-1349 (2007); Hallay et al., J. Biol. Chem. 281, 37159-37174 (2006); Saccone et al., Genomics 12, 171-174 (1992); Ghetti et al., FEBS Lett. 277, 272-276 (1990); Buvoli et al., EMBO 19, 1229-1235 (1990); Biamonti et al., J. Mol. Biol. 207, 491-503 (1989); Buvoli et al., Nucleic Acids Res. 16, 3751-3770 (1988).

[0108] Protein tyrosine phosphatase, receptor type, F polypeptide (receptor-linked protein-tyrosine phosphatase LAR; LCA-homolog; leukocyte antigen-related tyrosine phosphatase; leukocyte antigen-related (LAR) PTP receptor) is also known by the aliases PTPRF, EC 3.1.3.48, FLJ43335, FLJ45062, FLJ45567, LAR, LCA-homolog. There are at least 2 alternative transcripts for PTPRF (NP_{—}002831.2 (SEQ ID NO: 74) and NP_{—}569707.2 (SEQ ID NO: 75) encoded by the representative nucleotide sequences NM_{—}002840.3 (SEQ ID NO: 76) and NM_{—}130440.2 (SEQ ID NO: 77). The consensus sequence encodes for a 1897 amino acid protein of 211845 Da. The genomic location of PTPRF is chromosome 1 (Ensembl cytogenetic band: 1p34.2). The protein encoded by this gene is a member of the protein tyrosine phosphatase (PTP) family. PTPs are known to be signaling molecules that regulate a variety of cellular processes including cell growth, differentiation, mitotic cycle, and oncogenic transformation. This PTP possesses an extracellular region, a single transmembrane region, and two tandem intracytoplasmic catalytic domains, and thus represents a receptor-type PTP. The extracellular region contains three Ig-like domains, and 9 non-Ig like domains similar to that of neural-cell adhesion molecule. This PTP was shown to function in the regulation of epithelial cell-cell contacts at adherents junctions, as well as in the control of beta-catenin signaling. An increased expression level of this protein was found in the insulin-responsive tissue of obese, insulin-resistant individuals, and may contribute to the pathogenesis of insulin resistance. Two alternatively spliced transcript variants of this gene, which encode distinct proteins, have been reported. See Hoogenraad et al., Dev. Cell 12, 587-602 (2007); Haapasalo et al., J. Biol. Chem. 282, 9063-9072 (2007); Ruhe et al., Cell. Signal. 18, 1515-1527 (2006); Mander et al., FEBS Lett 579, 3024-3028 (2005); Hashimoto et al., J. Biol. Chem. 267, 13811-13814 (1992); Jirik et al., Cytogenet. Cell Genet. 61, 266-268 (1992); Streuli et al., EMBO J. 9, 2399-2407 (1990); Streuli et al., Proc. Natl. Acad. Sci. U.S.A. 86, 8698-8702 (1989); Streuli et al., J. Exp. Med. 168, 1523-1530 (1988).

[0109] Leucine rich repeat (in FLII) interacting protein 1 has also been described as GC-binding factor 2, LRR FLII-interacting protein, leucine-rich repeat flightless-interacting protein 1, TAR RNA-interacting protein, and transcription factor 9-like. Common aliases for this gene include LRRFIP1, FLAP-1, FLIIAP1, GCF-2, HUFI-1, MGC10947, MGC119738, MGC11739, and TRIP. LRRFIP1 encodes a 808 amino acid protein of 39761 Da in size (REFSEQ NP_{—}004726.1, SEQ ID NO: 78). The genomic location of LRRFIP1 is chromosome 2 (Ensembl cytogenetic band: 2q37.3), and a representative nucleotide sequence is NM_{—}004735.2 (SEQ ID NO: 79). This gene functions as a transcriptional repressor which preferentially binds to the GC-rich consensus sequence (5′-AGCCCCCGGCG-3′) and may regulate expression of TNF, EGFR and PDGFA. LRRFIP1 may control smooth muscle cell proliferation following artery injury through PDGFA repression. See Suriano et al., Mol. Cell. Biol. 25, 9073-9081 (2005); Khachigian et al., Circ. Res. 84, 1258-1267 (1999); Fong et al., Genomics 58, 146-157 (1999); Reed et al., J. Biol. Chem. 273, 21594-21602 (1998); Wilson et al., Nucleic Acids Res. 26, 3460-3467 (1998); Liu and Yin, J. Biol. Chem. 273, 7920-7927 (1998).

[0110] DKFZP686A01247 is a hypothetical protein identified, in part, by large-scale cDNA sequencing of HeLa cell nuclear phosphoproteins. DKFZP686A01247 encodes a 1083 amino acid protein of 121706 Da in size (REFSEQ NP_{—}055803.1, SEQ ID NO: 80). The genomic location of DKFZP686A01247 is chromosome 4 (Ensembl cytogenetic band: 4p14), and a representative nucleotide sequence is NM_{—}014988.1 (SEQ ID NO: 81). Although the function of this gene is not known, it contains LIM and calponin domains, implicating a role in cytoskeletal organization. See Beausoleil et al., Proc. Natl. Acad. Sci. U.S.A. 101, 12130-12135 (2004); Simpson et al., EMBO Rep. 1, 287-292 (2000).

[0111] Proteasome (prosome, macropain) 26S subunit, non-ATPase, 14 has also been described as 26S proteasome non-ATPase regulatory subunit 14, 26S proteasome regulatory subunit rpn11, and 26S proteasome-associated PAD1 homolog. Synonyms for this gene include PSMD14, PAD1, POH1, and rpn11. PSMD14 encodes a 310 amino acid protein of 34577 Da in size (REFSEQ NP_{—}005796.1, SEQ ID NO: 82). The genomic location of PSMD14 is chromosome 2 (Ensembl cytogenetic band: 2q24.2), and a representative nucleotide sequence is NM_{—}005805.3 (SEQ ID NO: 83). PSMD14 is a component of the 26S proteasome, a multiprotein complex that degrades proteins targeted for destruction by the ubiquitin pathway. PSMD14 is also part of a conserved mechanism that determines cellular susceptibility to cytotoxic agents, perhaps by influencing the ubiquitin-dependent proteolysis of transcription factors. See Gallery et al., Mol. Cancer. Ther. 6, 262-268 (2007); Ewing et al., Mol. Syst. Biol. 3, 89 (2007); Nabhan and Ribeiro, J. Biol. Chem. 281 (23), 16099-16107 (2006); Ambroggio et al., PLoS Biol. 2, E2 (2004); Spataro et al., J. Biol. Chem. 272, 30470-30475 (1997).

[0112] Additional examples of antigens associated with a likelihood of responsiveness to treatment with proliferation-incompetent tumor cells that express cytokines, e.g., GM-CSF are provided in Table 1 below.

TABLE 1

| Gene | Identity | Genbank # | Location | Size | Function | Notes |
|---|---|---|---|---|---|---|
| RSN | restin (Reed- | NM_198240 | cytoplasm, | 162 Kd | Intermediate filament associated protein that links | |
| | Steinberg cell- | (SEQ ID NO: 84) | cytoskeleton | | endocytic vesicles to microtubules. Restin was | |
| | expressed | | | | found to exhibit proproliferation/survival action on | |
| | intermediate | | | | ovarian cancer cells. Restin is a novel intermediate | |
| | filament- | | | | filament-associated protein highly expressed in the | |
| | associated | | | | Reed-Sternberg cells of Hodgkin's disease. | |
| | protein) (RSN), | | | | | |
| | transcript variant 2 | | | | | |
| DARS2 | aspartyl-tRNA | NM_018122 | cytoplasm, | 74 Kd | Mutations in DARS2, which encodes mitochondrial | |
| | synthetase 2 | (SEQ ID NO: 85) | mitochondrion | | aspartyl-tRNA synthetase, in affected individuals | |
| | (mitochondrial) | | | | with leukoencephalopathy with brain stem and | |
| | (DARS2) | | | | spinal cord involvement and lactate elevation. | |
| | | | | | tRNAs are often overexpressed in cancer cells. | |
| KTN1 | kinectin 1 | NM_182926 | membranes, ER | 156 Kd | Various cellular | Autoantibodies against |
| | (kinesin | (SEQ ID NO: 86) | | | organelles and vesicles | this protein have been |
| | receptor) | | | | are transported along | found in patients with |
| | (KTN1) | | | | the microtubules in the | autoimmune disease. |
| | | | | | cytoplasm. Likewise, | |
| | | | | | membrane recycling of | |
| | | | | | the endoplasmic | |
| | | | | | reticulum (ER), Golgi | |
| | | | | | assembly at the | |
| | | | | | microtubule organizing | |
| | | | | | center, and alignment | |
| | | | | | of lysosomes along | |
| | | | | | microtubules are all | |
| | | | | | related processes. The | |
| | | | | | transport of organelles | |
| | | | | | requires a special class | |
| | | | | | of microtubule- | |
| | | | | | associated proteins | |
| | | | | | (MAPs). One of these | |
| | | | | | is the molecular motor | |
| | | | | | kinesin, an ATPase | |
| | | | | | that moves vesicles | |
| | | | | | unidirectionally toward | |
| | | | | | the plus end of the | |
| | | | | | microtubule. Another | |
| | | | | | such MAP is kinectin, a | |
| | | | | | large integral ER | |
| | | | | | membrane protein. | |
| | | | | | Antibodies directed | |
| | | | | | against kinectin have | |
| | | | | | been shown to inhibit | |
| | | | | | its binding to kinesin. | |
| CENPF | centromere | NM_016343 | cytoplasm, | 368 Kd | This gene encodes a | Autoantibodies against |
| | protein F, | (SEQ ID NO: 87) | chromosome, | | protein that associates | this protein have been |
| | 350/400ka | | nucleus | | with the centromere- | found in patients with |
| | (mitosin) | | | | kinetochore complex. | cancer or graft versus |
| | (CENPF) | | | | The protein is a | host disease. |
| | | | | | component of the | |
| | | | | | nuclear matrix during | |
| | | | | | the G2 phase of | |
| | | | | | interphase. In late G2 | |
| | | | | | the protein associates | |
| | | | | | with the kinetochore | |
| | | | | | and maintains this | |
| | | | | | association through | |
| | | | | | early anaphase. It | |
| | | | | | localizes to the spindle | |
| | | | | | midzone and the | |
| | | | | | intracellular bridge in | |
| | | | | | late anaphase and | |
| | | | | | telophase, respectively, | |
| | | | | | and is thought to be | |
| | | | | | subsequently | |
| | | | | | degraded. The | |
| | | | | | localization of this | |
| | | | | | protein suggests that it | |
| | | | | | may play a role in | |
| | | | | | chromosome | |
| | | | | | segregation during | |
| | | | | | mitotis. It is thought to | |
| | | | | | form either a | |
| | | | | | homodimer or | |
| | | | | | heterodimer. | |
| | | | | | Autoantibodies against | |
| | | | | | this protein have been | |
| | | | | | found in patients with | |
| | | | | | cancer or graft versus | |
| | | | | | host disease. | |
| REST | RE1-silencing | NM_005612 | nucleus | 122 Kd | This gene encodes a | Abnormal expression of |
| | transcription | (SEQ ID NO: 88) | | | transcriptional | REST/NRSF and MYC |
| | factor (REST) | | | | repressor which | in undifferentiated neural |
| | | | | | represses neuronal | stem/progenitor cells |
| | | | | | genes in non-neuronal | causes cerebellum- |
| | | | | | tissues. It is a member | specific tumors. |
| | | | | | of the Kruppel-type zinc | |
| | | | | | finger transcription | |
| | | | | | factor family. It | |
| | | | | | represses transcription | |
| | | | | | by binding a DNA | |
| | | | | | sequence element | |
| | | | | | called the neuron- | |
| | | | | | restrictive silencer | |
| | | | | | element. The protein is | |
| | | | | | also found in | |
| | | | | | undifferentiated | |
| | | | | | neuronal progenitor | |
| | | | | | cells, and it is thought | |
| | | | | | that this repressor may | |
| | | | | | act as a master | |
| | | | | | negative regular of | |
| | | | | | neurogenesis. | |
| | | | | | Alternatively spliced | |
| | | | | | transcript variants have | |
| | | | | | been described; | |
| | | | | | however, their full | |
| | | | | | length nature has not | |
| | | | | | been determined. | |
| UBTF | upstream | NM_014233 | nucleus, | 89 Kd | Upstream binding factor (UBF) is a transcription | |
| | binding | (SEQ ID NO: 89) | nucleolus | | factor required for expression of the 18S, 5.8S, and | |
| | transcription | | | | 28S ribosomal RNAs, along with SL1 (a complex of | |
| | factor, RNA | | | | TBP (MIM 600075) and multiple TBP-associated | |
| | polymerase I | | | | factors or ‘TAFs’). Two UBF polypeptides, of 94 and | |
| | (UBTF) | | | | 97 kD, exist in the human (Bell et al., 1988). UBF is | |
| | | | | | a nucleolar phosphoprotein with both DNA binding | |
| | | | | | and transactivation domains. Sequence-specific | |
| | | | | | DNA binding to the core and upstream control | |
| | | | | | elements of the human rRNA promoter is mediated | |
| | | | | | through several HMG boxes. | |
| SUHW4 | suppressor of | NM_017661 | nucleus | 108 Kd | May be a | |
| | hairy wing | (SEQ ID NO: 90) | | | transcriptional factor. | |
| | homolog 4 | | | | | |
| | (Drosophila) | | | | | |
| | (SUHW4), | | | | | |
| | transcript variant | | | | | |
| BRWD1 | bromodomain | NM_033656 | cytoplasm, | 263 Kd | This gene encodes a member of the WD repeat | |
| | and WD repeat | (SEQ ID NO: 91) | nucleus | | protein family. WD repeats are minimally conserved | |
| | domain | | | | regions of approximately 40 amino acids typically | |
| | containing 1 | | | | bracketed by gly-his and trp-asp (GH-WD), which | |
| | (BRWD1), | | | | may facilitate formation of heterotrimeric or | |
| | transcript variant 2 | | | | multiprotein complexes. Members of this family are | |
| | | | | | involved in a variety of cellular processes, including | |
| | | | | | cell cycle progression, signal transduction, | |
| | | | | | apoptosis, and gene regulation. This protein contains | |
| | | | | | 2 bromodomains and multiple WD repeats, and the | |
| | | | | | function of this protein is not known. This gene is | |
| | | | | | located within the Down syndrome region-2 on | |
| | | | | | chromosome 21. | |
| SDCCAG8 | serologically | NM_006642 | | | | |
| | defined colon | (SEQ ID NO: 92) | | | | |
| | cancer antigen 8 | | | | | |
| | (SDCCAG8) | | | | | |
| SLMAP | sarcolemma | NM_007159 | vesicles, ER, | 95 Kd | Required for protein transport from the ER to the | |
| | associated | (SEQ ID NO: 93) | golgi | | golgi complex. | |
| | protein (SLMAP) | | | | | |
| FAF1 | Fas (TNFRSF6) | NM_131917 | cytoplasm, | 74 Kd | Interaction of Fas | By confocal microscopic |
| | associated | (SEQ ID NO: 94) | nucleus | | ligand (TNFSF6) with | analysis, both Fas and |
| | factor 1 (FAF1) | | | | the FAS antigen | FAF1 were detected in |
| | var 2 | | | | (TNFRSF6) mediates | the cytoplasmic |
| | | | | | programmed cell death, | membrane before Fas |
| | | | | | also called apoptosis, | activation, and in the |
| | | | | | in a number of organ | cytoplasm after Fas |
| | | | | | systems. The protein | activation. FADD and |
| | | | | | encoded by this gene | caspase-8 colocalized |
| | | | | | binds to the | with Fas in Jurkat cells |
| | | | | | cytoplasmic domain of | validating the presence |
| | | | | | FAS and can initiate | of FAF1 in the authentic |
| | | | | | apoptosis or enhance | Fas-DISC. |
| | | | | | apoptosis initiated | Overexpression of FAF1 |
| | | | | | through FAS antigen. | in Jurkat cells caused |
| | | | | | Initiation of apoptosis | significant apoptotic |
| | | | | | by the protein encoded | death. In addition, the |
| | | | | | by this gene requires a | FAF1 deletion mutant |
| | | | | | ubiquitin-like domain | lacking the N terminus |
| | | | | | but not the FAS- | where Fas, FADD, and |
| | | | | | binding domain. | caspase-8 interact |
| | | | | | | protected Jurkat cells |
| | | | | | | from Fas-induced |
| | | | | | | apoptosis demonstrating |
| | | | | | | dominant-negative |
| | | | | | | phenotype. Cell death by |
| | | | | | | overexpression of FAF1 |
| | | | | | | was suppressed |
| | | | | | | significantly in both |
| | | | | | | FADD- and caspase-8- |
| | | | | | | deficient Jurkat cells |
| | | | | | | when compared with that |
| | | | | | | in their parental Jurkat |
| | | | | | | cells. Collectively, our |
| | | | | | | data show that FAF1 is a |
| | | | | | | member of Fas-DISC |
| | | | | | | acting upstream of |
| | | | | | | caspase-8. |
| ETNK1 | ethanolamine | NM_001039481 | cytoplasm | 51 Kd | This gene encodes an ethanolamine kinase, which | |
| | kinase 1 | (SEQ ID NO: 95) | | | functions in the first committed step of the | |
| | (ETNK1), | | | | phosphatidylethanolamine synthesis pathway. This | |
| | transcript variant 2 | | | | cytosolic enzyme is specific for ethanolamine and | |
| | | | | | exhibits negligible kinase activity on choline. | |
| ICA1 | islet cell | NM_004968 | cytoplasm, | 55 Kd | This gene encodes a protein with an arfaptin | |
| | autoantigen 1, | (SEQ ID NO: 96) | golgi, vesicles | (69 Kd | homology domain that is found both in the cytosol | |
| | 69 kDa (ICA1), | | | from NC BI) | and as membrane-bound form on the Golgi complex | |
| | transcript variant 2 | | | | and immature secretory granules. This protein is | |
| | | | | | believed to be an autoantigen in insulin-dependent | |
| | | | | | diabetes mellitus and primary Sjogren's syndrome. | |
| | | | | | Alternatively spliced variants which encode different | |
| | | | | | protein isoforms have been described; however, not | |
| | | | | | all variants have been fully characterized. | |
| ARL6IP5 | ADP- | NM_006407 | cytoplasm, | 22 Kd | Expression of this gene is affected by vitamin A. The | |
| | ribosylation-like | (SEQ ID NO: 97) | ER, | | encoded protein of this gene may be associated with | |
| | factor 6 | | membrane | | the cytoskeleton. A similar protein in rats may play a | |
| | interacting | | | | role in the regulation of cell differentiation. The rat | |
| | protein 5 | | | | protein binds and inhibits the cell membrane | |
| | (ARL6IP5) | | | | glutamate transporter EAAC1. The expression of the | |
| | | | | | rat gene is upregulated by retinoic acid, which | |
| | | | | | results in a specific reduction in EAAC1-mediated | |
| | | | | | glutamate transport. | |
| POLR1B | polymerase | NM_019014 | nucleus | 128 Kd | DNA-dependent RNA | Our analysis indicates |
| | (RNA) I | (SEQ ID NO: 98) | | | polymerase catalyzes | that the ribozymes |
| | polypeptide B, | | | | the transcription of | toward ROCK1 can |
| | 128 kDa | | | | DNA into RNA using | block invasive activity |
| | (POLR1B) | | | | the four ribonucleoside | but not the proliferation |
| | | | | | triphosphates as | of HT1080 cells without |
| | | | | | substrates. RNA | having any effect on |
| | | | | | polymerase i is | expression of ROCK2. |
| | | | | | essentially used to | |
| | | | | | transcribe ribosomal | |
| | | | | | DNA units. | |
| UHMK1 | U2AF homology | NM_175866 | nucleus, | 47 Kd | UHMK1 is a serine threonine kinase nuclear protein | |
| | motif (UHM) | (SEQ ID NO: 99) | cytoplasm | | and is highly expressed in regions of the brain | |
| | kinase 1 | | | | implicated in schizophrenia | |
| | (UHMK1) | | | | | |
| CHMP4C | chromatin | NM_152284 | cytoplasm | 26 Kd | CHMP4C belongs to the chromatin-modifying | |
| | modifying | (SEQ ID NO: 100) | | | protein/charged multivesicular body protein (CHMP) | |
| | protein 4C | | | | family. These proteins are components of ESCRT-III | |
| | (CHMP4C) | | | | (endosomal sorting complex required for transport | |
| | | | | | III), a complex involved in degradation of surface | |
| | | | | | receptor proteins and formation of endocytic | |
| | | | | | multivesicular bodies (MVBs). Some CHMPs have | |
| | | | | | both nuclear and cytoplasmic/vesicular distributions, | |
| | | | | | and one such CHMP, CHMP1A (MIM 164010), is | |
| | | | | | required for both MVB formation and regulation of | |
| | | | | | cell cycle progression. | |
| SPATA5 | spermatogenesis | NM_145207 | cytoplasm | 98 Kd | A novel spermatogenesis associated factor (SPAF) | |
| | associated 5 | (SEQ ID NO: 101) | | | was found to be aberrantly expressed at the malignant | |
| | (SPATA5) | | | | conversion stage in a clonal epidermal model of | |
| | | | | | chemical carcinogenesis. May be involved in FGF | |
| | | | | | signalling - part of the FGF2-NUDT6-SPATA5-SPRY1 | |
| | | | | | locus at human chromosome 4q27-q28.1. | |
| BRAP | BRCA1 | NM_006768 | | | | |
| | associated | (SEQ ID NO: 102) | | | | |
| | protein (BRAP) | | | | | |
| TPR | translocated | NM_003292 | cytoplasm, | 16 Kd | This gene encodes a | PHA665752 is a potent |
| | promoter region | (SEQ ID NO: 103) | nucleus | | large coiled-coil protein | small molecule-selective |
| | (to activated | | | | that forms intranuclear | c-MET inhibitor and is |
| | MET oncogene) | | | | filaments attached to | highly active against |
| | (TPR) | | | | the inner surface of | TPR-MET-transformed |
| | | | | | nuclear pore | cells both biologically |
| | | | | | complexes (NPCs). | and biochemically. |
| | | | | | The protein directly | PHA665752 is also |
| | | | | | interacts with several | active against H441 |
| | | | | | components of the | NSCLC cells. The c- |
| | | | | | NPC. It is required for | MET inhibitor can |
| | | | | | the nuclear export of | cooperate with |
| | | | | | mRNAs and some | rapamycin in therapeutic |
| | | | | | proteins. Oncogenic | inhibition of NSCLC, and |
| | | | | | fusions of the 5′ end of | in vivo studies of this |
| | | | | | this gene with several | combination against c- |
| | | | | | different kinase genes | MET expressing cancers |
| | | | | | occur in some | would be merited. |
| | | | | | neoplasias. | |
| PSMD7 | proteasome | NM_002811 | | | | |
| | (prosome, | (SEQ ID NO: 104) | | | | |
| | macropain) 26S | | | | | |
| | subunit, non- | | | | | |
| | ATPase, 7 | | | | | |
| | (Mov34 | | | | | |
| | homolog) | | | | | |
| | (PSMD7) | | | | | |
| NRBF2 | nuclear receptor | NM_030759 | cytoplasm, | 32 Kd | A protein named nuclear receptor binding factor-2 | |
| | binding factor 2 | (SEQ ID NO: 105) | nucleus | | (NRBF-2) was identified by yeast two-hybrid screening, | |
| | (NRBF2) | | | | as an interaction partner of peroxisome proliferator- | |
| | | | | | activated receptor alpha as well as several other | |
| | | | | | nuclear receptors. NRBF-2 exhibited a gene activation | |
| | | | | | function, when tethered to a heterologous DNA binding | |
| | | | | | domain, in both mammalian cells and yeast. The | |
| | | | | | activation domain, their small size (COPR1, 26.9 kDa; | |
| | | | | | COPR2, 32.4 kDa), and strict dependence on AF-2 for | |
| | | | | | interaction distinguish COPR1 and COPR2 from the | |
| | | | | | SMRT/NCoR type of corepressor and may dampen | |
| | | | | | rather than repress NR-mediated gene expression. | |
| ROCK2 | Rho-associated, | NM_004850 | cytoplasm, | 161 Kd | The protein encoded by this gene is a serine/threonine | |
| | coiled-coil | (SEQ ID NO: 106) | nucleus | | kinase that regulates cytokinesis, smooth muscle | |
| | containing | | | | contraction, the formation of actin stress fibers and | |
| | protein kinase 2 | | | | focal adhesions, and the activation of the c-fos serum | |
| | (ROCK2) | | | | response element. This protein, which is an isozyme of | |
| | | | | | ROCK1 is a target for the small GTPase Rho. | |
| MAML3 | mastermind-like | NM_018717 | nucleus | 122 Kd | Lin et al. (2002) found | Notch has also been |
| | 3 (Drosophila) | (SEQ ID NO: 107) | | | that the MAML proteins | linked to the |
| | (MAML3) | | | | stabilized and | pathogenesis of small- |
| | | | | | participated in the | cell lung |
| | | | | | Notch/CSL DNA- | cancer (SCLC), a tumor |
| | | | | | binding complex and | with neuroendocrine |
| | | | | | enhanced the | (NE) differentiation. |
| | | | | | activation of | |
| | | | | | transcription from the | |
| | | | | | target promoter. They | |
| | | | | | found that activation of | |
| | | | | | the target promoter by | |
| | | | | | NOTCH3 (600276) and | |
| | | | | | NOTCH4 (164951) was | |
| | | | | | more efficiently | |
| | | | | | potentiated by MAML3 | |
| | | | | | than by MAML1 or | |
| | | | | | MAML2. | |
| FAM50A | family with | NM_004699 | nucleus | 40 Kd | May be a DNA-binding protein or transcriptional factor. | |
| | sequence | (SEQ ID NO: 108) | | | | |
| | similarity 50, | | | | | |
| | member A | | | | | |
| | (FAM50A) | | | | | |
| STK39 | serine threonine | NM_013233 | cytoplasm, | 60 Kd | This gene encodes a | Lower mRNA expression |
| | kinase 39 | (SEQ ID NO: 109) | nucleus | | serine/threonine kinase | of HERPUD1, STK39, |
| | (STE20/SPS1 | | | | that is thought to | DHCR24, and SOCS2 in |
| | homolog, yeast) | | | | function in the cellular | primary prostate tumors |
| | (STK39) | | | | stress response | was correlated with a |
| | | | | | pathway. The kinase is | higher incidence of |
| | | | | | activated in response | metastases after radical |
| | | | | | to hypotonic stress, | prostatectomy. |
| | | | | | leading to | Tolerance induction by |
| | | | | | phosphorylation of | mixed chimerism and |
| | | | | | several cation-chloride- | costimulation blockade is |
| | | | | | coupled cotransporters. | a promising approach to |
| | | | | | The catalytically active | avoid |
| | | | | | kinase specifically | immunosuppression, but |
| | | | | | activates the p38 MAP | the molecular basis of |
| | | | | | kinase pathway, and its | tolerant T lymphocytes |
| | | | | | interaction with p38 | remains elusive. The |
| | | | | | decreases upon | genome-wide gene |
| | | | | | cellular stress, | expression profile of |
| | | | | | suggesting that this | murine T lymphocytes |
| | | | | | kinase may serve as an | after tolerance induction |
| | | | | | intermediate in the | by allogeneic bone |
| | | | | | response to cellular | marrow transplantation |
| | | | | | stress. | (BMT) and costimulatory |
| | | | | | | blockade using the anti- |
| | | | | | | CD40L antibody MR1 |
| | | | | | | has been investigated. |
| | | | | | | Molecular functions, |
| | | | | | | biological processes, |
| | | | | | | cellular locations, and |
| | | | | | | coregulation of identified |
| | | | | | | genes were determined. |
| | | | | | | A total of 113 unique |
| | | | | | | genes exhibited a |
| | | | | | | significant differential |
| | | | | | | expression between the |
| | | | | | | lymphocytes of MR1- |
| | | | | | | treated Tolerance (TOL) |
| | | | | | | and untreated recipients |
| | | | | | | Control (CTRL). The |
| | | | | | | majority of genes |
| | | | | | | upregulated in the TOL |
| | | | | | | group are involved in |
| | | | | | | several signal |
| | | | | | | transduction cascades |
| | | | | | | such as members of the |
| | | | | | | MAPKKK cascade (IL6, |
| | | | | | | Tob2, Stk39, and D |

| | | | | | |
|---|---|---|---|---|---|
| TRMT5 | TRM5 tRNA | NM_020810 | nucleus, | 58 Kd | tRNAs contain as many as 13 or 14 nucleotides that |
| | methyltransferase | (SEQ ID NO: 110) | cytoplasm | | are modified posttranscriptionally by enzymes that are |
| | 5 homolog | | | | highly specific for particular nucleotides in the tRNA |
| | (TRMT5) | | | | structure. TRMT5 methylates the N1 position of |
| | | | | | guanosine-37 (G37) in selected tRNAs using S- |
| | | | | | adenosyl methionine. |
| RPIA | ribose 5- | NM_144563 | cytoplasm | 33 Kd | This enzyme belongs to the family of isomerases, |
| | phosphate | (SEQ ID NO: 111) | | | specifically those intramolecular oxidoreductases |
| | epimerase | | | | interconverting aldoses and ketoses. The systematic |
| | (RPIA) | | | | name of this enzyme class is D-ribose-5-phosphate |
| | | | | | aldose-ketose-isomerase. Other names in common use |
| | | | | | include phosphopentosisomerase, |
| | | | | | phosphoriboisomerase, ribose phosphate isomerase, |
| | | | | | 5-phosphoribose isomerase, D-ribose 5-phosphate |
| | | | | | isomerase, and D-ribose-5-phosphate ketol-isomerase. |
| | | | | | This enzyme participates in pentose phosphate |
| | | | | | pathway and carbon fixation. |

[0113] A summary of antigens associated with a likelihood of responsiveness to treatment with proliferation-incompetent tumor cells that express cytokines, e.g., GM-CSF are provided in Tables 2, 3 and 4 in the Examples below.

### 4.3 METHODS OF USING ANTIGENS

[0114] The antigens provided herein find use in a variety of methods, including methods for determining whether an immune response against cancer cells has been induced in a subject, methods for determining whether an immune response effective to treat, prevent, or ameliorate a symptom of lung cancer in a subject has been induced in the subject, methods for determining whether a subject afflicted with lung cancer is likely to respond to treatment with genetically modified tumor cells that produce GM-CSF, and methods for assessing the effectiveness of lung cancer therapy with genetically modified tumor cells that express GM-CSF to treat or ameliorate a symptom of lung cancer of a subject in need thereof. In certain embodiments, the lung cancer is non-small cell lung cancer (NSCLC).

[0115] In another aspect, provided herein is a method for determining whether an immune response effective to treat, prevent, or ameliorate a symptom of non-small cell lung cancer in a subject has been induced in the subject, comprising detecting an immune response against an antigen listed in Table 2, 3 or 4, wherein detecting said antigen indicates that an immune response effective to treat, prevent, or ameliorate a symptom of non-small cell lung cancer has been induced in the subject. In certain embodiments, an immune response is detected against an antigen identified in Table 2. In certain embodiments, an immune response is detected against an antigen identified in Table 3. In certain embodiments, an immune response is detected against an antigen identified in Table 4. In certain embodiments, an immune response against 1, 2, 3, 4, 5, 6, 7, 8, 9, 10, 11, 12, 13, 14, 15, 16, 17, 18, 19, 20, 21, 22, 23, 24, 25 or more of the antigens identified in Table 2 is detected. In certain embodiments, an immune response against 1, 2, 3, 4, 5, 6, 7, 8, 9, 10, 11, 12, 13, 14, 15, 16, 17, 18, 19, 20, 21, 22, 23, 24, 25 or more of the antigens identified in Table 3 is detected. In certain embodiments, an immune response against 1, 2, 3, 4, 5, 6, 7, 8, 9, 10, 11, 12, 13, 14, 15, 16, 17, 18, 19, 20, 21, 22, 23, 24, 25 or more of the antigens identified in Table 4 is detected.

[0116] In certain embodiments, the immune response that has been induced is effective to prevent lung cancer in the subject. In certain embodiments, the immune response that has been induced is effective to treat lung cancer in the subject. In certain embodiments, the immune response that has been induced is effective to ameliorate a symptom of lung cancer in the subject. In certain embodiments, the symptom of lung cancer that is ameliorated is selected from the group consisting of cancer-associated pain and metastasis. In certain embodiments, the immune response is effective to result in decreased serum concentrations of tumor specific markers, increased overall survival time, increased progression-free survival, decreased tumor size, decreased metastasis marker response, increased impact on minimal residual disease, increased induction of antibody response to the cancer cells that have been rendered proliferation-incompetent, increased induction of delayed-type-hypersensitivity (DTH) response to injections of autologous tumor, increased induction of T cell response to autologous tumor or candidate tumor-associated antigens, or increased impact on circulating T cell and dendritic cell numbers, phenotype, and function, cytokine response, reduced metastasis as measured by bone scan/MRI or other methods, increased time to progression, decreased serum concentrations of ICTP, decreased concentrations of serum C-reactive protein or decreased numbers of circulating tumor cells (CTCs).

[0117] Any method known by those skilled in the art for detecting an immune response can be used in accordance with the methods provided herein. In certain embodiments, the immune response is detected by western blot. In certain embodiments, the immune response is detected by ELISA. In certain embodiments, the immune response is detected by protein array analysis.

### 4.4 CORRELATION OF IMMUNE RESPONSE WITH LIKELIHOOD OF RESPONDING OR RESPONSIVENESS

[0118] Clinical datasets of immune responses with clinical outcome data can be used to correlate immune responses with likelihood of responding to cancer therapy or with responsiveness to cancer therapy.

[0119] Any method known in the art, without limitation, can be used to assess the immune response of a subject administered a cancer therapy, e.g., a cell-based cancer immunotherapy such as, e.g., GVAX® therapy. For example, such immune responses can be assessed by western blot, by ELISA, by protein array analysis, and the like.

[0120] Similarly, any method known in the art can be used to determine whether an immune response is correlated with responsiveness to cancer therapy. Typically, P values are used to determine the statistical significance of the correlation, such that the smaller the P value, the more significant the measurement. Preferably the P values will be less than 0.05 (or 5%). More preferably, P values will be less than 0.01. P values can be calculated by any means known to one of skill in the art. For the purposes of correlating an immune response with responsiveness to cancer therapy, P values can be calculated using Fisher's Exact Test. See, e.g., David Freedman, Robert Pisani & Roger Purves, 1980, STATISTICS, W. W. Norton, New York. P values may be calculated using Student's paired and/or unpaired t-test and the non-parametric Kruskal-Wallis test (Statview 5.0 software, SAS, Cary, N.C.).

[0121] Typically, immune responses are measured from biological samples obtained from a subject. Biological samples from a subject include, for example and without limitation, blood, blood plasma, serum, urine, saliva, tissue swab and the like.

### 4.5 CONSTRUCTING AN ALGORITHM

[0122] In one aspect, provided herein is a method of constructing an algorithm that correlates immune response data with responsiveness to cancer therapy, e.g., a cell-based cancer immunotherapy such as, e.g., GVAX® therapy. In one embodiment, the method of constructing the algorithm comprises creating a rule or rules that correlate immune response data with responsiveness to cancer therapy, e.g., a cell-based cancer immunotherapy such as, e.g., GVAX® therapy.

[0123] In one embodiment, a data set comprising immune response data and clinical outcome data about each subject in a set of subjects is assembled. Any method known in the art can be used to collect immune response data. Examples of methods of collecting such data are provided above. Any method known in the art can be used for collecting clinical outcome data.

[0124] In some embodiments, the data set comprises immune responses against one or more antigens as described herein. In some embodiments, the data set comprises immune responses against 1, 2, 3, 4, 5, 6, 7, 8, 9, 10, 11, 12, 13, 14, 15, 16, 17, 18, 19, 20, 21, 22, 23, 24, 25, or more antigens.

[0125] In some embodiments, the clinical outcome data comprises information regarding cancer-associated pain and/or metastasis. In some embodiments, the clinical outcome data comprises information regarding the serum concentrations of tumor specific markers, overall survival time, progression-free survival, tumor size, metastasis marker response, impact on minimal residual disease, induction of antibody response to the cancer cells that have been rendered proliferation-incompetent, induction of delayed-type-hypersensitivity (DTH) response to injections of autologous tumor, induction of T cell response to autologous tumor or candidate tumor-associated antigens, and/or impact on circulating T cell and dendritic cell numbers, phenotype, and/or function, cytokine response and decrease in number of circulating tumor cells (CTC).

[0126] The immune response and clinical outcome data in the data set can be represented or organized in any way known in the art. In one embodiment, the data are displayed in the form of a graph. In another embodiment, the immune response and clinical outcome data in the data set are displayed in the form of a chart.

[0127] In one aspect, an algorithm is formulated that correlates the immune response with the clinical outcome data in the data set. In one embodiment, a clinical outcome cutoff point is defined. In some embodiments, the clinical outcome cutoff point is determined relative to a reference subject, and the cutoff point is the value above or below which a subject is defined as responsive to the cancer therapy and below or above which a subject is defined nonresponsive to the cancer therapy. One skilled in the art will recognize that for some clinical indicators, e.g., survival time, an increase in the clinical indicator indicates responsiveness, while for other clinical indicators, e.g., tumor size or tumor marker, an increase in the clinical indicator indicates nonresponsiveness.

[0128] In another embodiment, the upper or lower clinical cutoff point is used to define the level of immune responsiveness. In one embodiment, the number of antigens against which an immune response and/or the concentration of antibodies against an antigen against which an immune response is raised is correlated with the clinical outcome data. An immune response cutoff point can be selected such that most subjects having an immune response against more than that number of antigens or with a concentration of antibodies higher than the cutoff concentration in the data set are immunologically responsive to treatment (IR-R), and most subjects having fewer or less than that number are immunologically not responsive (IR-N). By definition, a subject in the data set with clinical outcome data more or less than, as appropriate, the clinical outcome cutoff is clinically responsive (“CL-R”) to the cancer treatment, and a subject in the data set with fewer or more than, as appropriate, the clinical outcome cutoff is clinically nonresponsive (“CL-N”) to the treatment. Thus, in one embodiment, a immune response cutoff point is selected that produces the greatest percentage of subject in the data set that are either clinically and immunologically responsive (“IR-R, CL-R”), or immunologically responsive and clinically nonresponsive (“IR-N, CL-N”).

[0129] While this simple algorithm can provide a useful approximation of the relationship between the immune response and clinical outcome data in the data set, in most cases there will be a significant number of subjects that are clinically nonresponsive but immunologically responsive (“CL-N, IR-R”), or immunologically nonresponsive but clinically responsive (“CL-R, IR-N”). These discordant results are a measure of the inaccuracy of the algorithm. Thus, in some embodiments, the algorithm is further modified to reduce the percentage of discordant results in the data set.

[0130] In another embodiment, the percentage of discordant results is reduced by assigning differential weight values to immune responses against one or more antigens observed in the data set. An algorithm that does not include this step assumes that each immune response in the data set contributes equally to the overall clinical outcome. In many cases this will not be true. For example, there may be a antigen in a data set that is almost always correlated with responsiveness to a cancer treatment. That is, almost every subject that has an immune response against the antigen is clinically responsive, even those subjects having an immune response against only one or two total antigens. In one embodiment, immune responses against such antigens are “weighted,” e.g., assigned an increased score. An immune response can be assigned a weight of, for example, two, three, four, five, six, seven, eight or more. For example, an immune response assigned a weight of 2 can be counted as two immune responses in a subject. Fractional weighting values can also be assigned. In certain embodiments, a value between zero and one can be assigned when an immune response is weakly associated with a clinical outcome. In another embodiment, values of less than zero can be assigned, wherein an immune response is associated with an negative clinical outcome to the anti-viral treatment.

[0131] One of skill in the art will appreciate that there is a tradeoff involved in assigning an increased weight to certain immune responses. As the weight of the immune response is increased, the number of IR-R, CL-N discordant results may increase. Thus, assigning a weight to an immune response that is too great may increase the overall discordance of the algorithm. Accordingly, in one embodiment, a weight is assigned to an immune response that balances the reduction in IR-N, CL-R results with the increase in IR-R, CL-N results.

[0132] In another embodiment, the interaction of different immune responses in the data set with each other is also factored into the algorithm. For example, it might be found that two or more immune responses behave synergistically, i.e., that the coincidence of the immune responses in a subject contributes more significantly to the clinical outcome than would be predicted based on the effect of each immune response independent of the other. Alternatively, it might be found that the coincidence of two or more immune responses in a subject contributes less significantly to the clinical outcome than would be expected from the contributions made to resistance by each immune response when it occurs independently. Also, two or more immune responses may be found to occur more frequently together than as independent immune responses. Thus, in one embodiment, immune responses occurring together are weighted together. For example, only one of the immune responses is assigned a weight of 1 or greater, and the other immune response or immune responses are assigned a weight of zero, in order to avoid an increase in the number of IR-R, CL-N discordant results.

[0133] In another aspect, the immune response cutoff point can be used to define a clinical outcome cutoff point by correlating the concentrations of antibody induced as well as the antigens against which immune responses are induced in the data set with the clinical outcome.

[0134] In one embodiment, an algorithm is constructed that factors in the requirement for a certain concentration of antibody that is induced

[0135] By using, for example, the methods discussed above, the algorithm can be designed to achieve any desired result. In one embodiment, the algorithm is designed to maximize the overall concordance (the sum of the percentages of the IR-R, CL-R and the IR-N, CL-N groups, or 100−(percentage of the IR-N, CL-R+IR-R, CL-N groups). In some embodiments, the overall concordance is greater than 75%, 80%, 85%, 90% or 95%. In one embodiment, the algorithm is designed to minimize the percentage of IR-R, CL-N results. In another embodiment, the algorithm is designed to minimize the percentage of IR-N, CL-R results. In another embodiment, the algorithm is designed to maximize the percentage of IR-R, CL-R results. In another embodiment, the algorithm is designed to maximize the percentage of IR-N, CL-N results.

[0136] At any point during the construction of the algorithm, or after it is constructed, it can be further tested on a second data set. In one embodiment, the second data set consists of subjects that are not included in the data set, i.e., the second data set is a naïve data set. In another embodiment, the second data set contains one or more subjects that were in the data set and one or more subjects that were not in the data set. Use of the algorithm on a second data set, particularly a naïve data set, allows the predictive capability of the algorithm to be assessed. Thus, in one embodiment, the accuracy of an algorithm is assessed using a second data set, and the rules of the algorithm are modified as described above to improve its accuracy. In another embodiment, an iterative approach is used to create the algorithm, whereby an algorithm is tested and then modified repeatedly until a desired level of accuracy is achieved.

### 4.6 USING AN ALGORITHM TO PREDICT THE RESPONSIVENESS OF A SUBJECT

[0137] In another aspect, also provided herein is a method for using an algorithm to predict the responsiveness of a subject to a cancer therapy based on the immune responses of the subject. In one embodiment, the method comprises detecting, in the subject or derivative of the subject, the presence or absence of an immune response against one or more antigens associated with responsiveness to a cancer therapy, applying the rules of the algorithm to the detected immune responses, wherein a subject that satisfies the rules of the algorithm is responsive or partially responsive to the treatment, and a subject that does not satisfy the rules of the algorithm is nonresponsive to the treatment.

[0138] In another embodiment, the method comprises detecting, in the subject or derivative of the subject, the presence or absence of an immune response against one or more antigens associated with responsiveness to a cancer therapy, applying the rules of the algorithm to the detected mutations, wherein a score equal to, or greater than the immune response cutoff score indicates that the subject is responsive or partially responsive to the treatment, and a score less than the immune response cutoff score indicates that the subject is nonresponsive to the treatment.

[0139] In yet another embodiment, the method comprises detecting, in the subject or derivative of the subject, the presence or absence of an immune response against one or more antigens associated with responsiveness to a cancer therapy, applying the rules of the algorithm to the detected immune responses, wherein a score less than zero indicates that the subject is not likely to respond to the cancer treatment.

### 4.7 IMMUNOGENIC COMPOSITIONS COMPRISING CELLS EXPRESSING CYTOKINES

[0140] The methods provided herein relate, in part, to methods relating to the effectiveness of cancer therapy with cells genetically altered to express cytokines, e.g., GM-CSF. Cancer therapies with cells genetically altered to express cytokines are extensively described hereinafter.

[0141] In one aspect, the method of treating lung cancer in a subject comprises administering genetically modified cytokine-expressing cells to the subject as part of a therapeutic treatment for cancer. The method can be carried out by genetically modifying (transducing) a first population of tumor cells to produce a cytokine, e.g., GM-CSF, and administering the first population of tumor cells alone or in combination with a second population of tumor cells to the subject. The tumor cells may be tumor cells from the same individual (autologous), from a different individual (allogeneic) or bystander cells (further described below). The tumor cells may be from a tumor cell line of the same type as the tumor or cancer being treated, e.g., the modified cells are lung cells or lung cancer cells and the patient has lung cancer. Alternatively, the tumor cells may be from a tumor cell line of a different type as the tumor or cancer being treated, e.g., the modified cells are prostate cells or prostate cancer cells and the patient has lung cancer.

[0142] Typically the genetically modified tumor cells are rendered proliferation incompetent prior to administration. In one embodiment, the mammal is a human who harbors lung tumor cells of the same type as the genetically modified cytokine-expressing tumor cells. In a preferred embodiment, an improved therapeutic outcome is evident following administration of the genetically modified cytokine-expressing tumor cells to the subject. Any of the various parameters of an improved therapeutic outcome for a non-small cell lung cancer patient known to those of skill in the art may be used to assess the efficacy of genetically modified cytokine-expressing tumor cell therapy.

[0143] In still another aspect, the method is effective to stimulate a systemic immune response in a lung cancer patient, comprising administering a therapeutically effective amount of proliferation incompetent genetically modified cytokine-expressing cells to the subject. The systemic immune response to the cytokine-expressing cells may result in regression or inhibition of the growth of lung tumor cells. In certain embodiments, the lung cancer is non-small cell lung cancer (NSCLC). In some embodiments, the non-small cell lung cancer is early stage non-small cell lung cancer. In some embodiments, the non-small cell lung cancer is advanced stage non-small cell lung cancer. In some embodiments, non-small cell lung cancer is stage IIIA, IIIB, or IV non-small cell lung cancer.

[0144] In some embodiments, the primary lung tumor has been treated, e.g., by ablation or rescission and metastases of the primary lung cancer are treated by immunotherapy as described herein.

[0145] In one preferred embodiment, a viral or nonviral vector is utilized to deliver a human GM-CSF transgene (coding sequence) to a human tumor cell ex vivo. After transduction, the cells are irradiated to render them proliferation incompetent. The proliferation incompetent GM-CSF expressing tumor cells are then re-administered to the patient (e.g., by the intradermal or subcutaneous route) and thereby function as a cancer immunotherapy. The human tumor cell may be a primary tumor cell or derived from a tumor cell line.

[0146] In general, the genetically modified tumor cells include one or more of autologous tumor cells, allogeneic tumor cells and tumor cell lines (i.e., bystander cells). The tumor cells may be transduced in vitro, ex vivo or in vivo. Autologous and allogeneic cancer cells that have been genetically modified to express a cytokine, e.g., GM-CSF, followed by readministration to a patient for the treatment of cancer are described in U.S. Pat. Nos. 5,637,483, 5,904,920 and 6,350,445, expressly incorporated by reference herein. A form of GM-CSF-expressing genetically modified tumor cells or a “cytokine-expressing cellular immunotherapy” (“GVAX”®), for the treatment of pancreatic cancer is described in U.S. Pat. Nos. 6,033,674 and 5,985,290, expressly incorporated by reference herein. A universal immunomodulatory genetically modified bystander cell line is described in U.S. Pat. No. 6,464,973, expressly incorporated by reference herein.

[0147] An allogeneic form of GVAX® wherein the cellular immunotherapy comprises one or more prostate tumor cell lines selected from the group consisting of DU145, PC-3, and LNCaP is described in WO/0026676, expressly incorporated by reference herein. LNCaP is a PSA-producing prostate tumor cell line, while PC-3 and DU-145 are non-PSA-producing prostate tumor cell lines (Pang S. et al., Hum Gene Ther. 1995 November; 6(11):1417-1426).

[0148] Clinical trials employing GM-CSF-expressing cellular immunotherapy (GVAX®) have been undertaken for treatment of prostate cancer, melanoma, lung cancer, pancreatic cancer, renal cancer, and multiple myeloma. A number of clinical trials using GVAX® cellular immunotherapy have been described, most notably in melanoma, and prostate, renal and pancreatic carcinoma (Simons J W et al. Cancer Res. 1999; 59:5160-5168; Simons J W et al., Cancer Res 1997; 57:1537-1546; Soiffer R et al. Proc. Natl. Acad. Sci. USA 1998; 95:13141-13146; Jaffee, et al. J Clin Oncol 2001; 19:145-156; Salgia et al. J Clin Oncol 2003 21:624-30; Soiffer et al. J Clin Oncol 2003 21:3343-50; Nemunaitis et al. J Natl Cancer Inst. 2004 Feb. 18 96(4):326-31).

[0149] By way of example, in one approach, genetically modified GM-CSF expressing tumor cells are provided as an allogeneic or bystander cell line and one or more additional cancer therapeutic agents is included in the treatment regimen. In another approach, one or more additional transgenes are expressed by an allogeneic or bystander cell line while a cytokine (i.e., GM-CSF) is expressed by autologous or allogeneic cells. The GM-CSF coding sequence is introduced into the tumor cells using a viral or non-viral vector and routine methods commonly employed by those of skill in the art. The preferred coding sequence for GM-CSF is the genomic sequence described in Huebner K. et al., Science 230(4731):1282-5,1985, however, in some cases the cDNA form of GM-CSF finds utility in practicing the methods (Cantrell et al., Proc. Natl. Acad. Sci., 82, 6250-6254, 1985).

[0150] The genetically modified tumor cells can be cryopreserved prior to administration. Preferably, the genetically modified tumor cells are irradiated at a dose of from about 50 to about 200 rads/min, even more preferably, from about 120 to about 140 rads/min prior to administration to the patient. Preferably, the cells are irradiated with a total dose sufficient to inhibit substantially 100% of the cells from further proliferation. Thus, desirably the cells are irradiated with a total dose of from about 10,000 to 20,000 rads, optimally, with about 15,000 rads. Typically more than one administration of cytokine (e.g., GM-CSF) producing cells is delivered to the subject in a course of treatment. Dependent upon the particular course of treatment, multiple injections may be given at a single time point with the treatment repeated at various time intervals. For example, an initial or “priming” treatment may be followed by one or more “booster” treatments. Such “priming” and “booster” treatments are typically delivered by the same route of administration and/or at about the same site. When multiple doses are administered, the first immunization dose may be higher than subsequent immunization doses. For example, a 5×10⁶ prime dose may be followed by several booster doses of 10⁶ to 3×10⁶ GM-CSF producing cells.

[0151] A single injection of cytokine-producing cells is typically between about 10⁶ to 10⁸ cells, e.g., 1×10⁶, 2×10⁶, 3×10⁶, 4×10⁶, 5×10⁶, 6×10⁶, 7×10⁶, 8×10⁶, 9×10⁶, 10⁷, 2×10⁷, 5×10⁷, or as many as 10⁸ cells. In one embodiment, there are between 10⁶ and 10⁸ cytokine-producing cells per unit dose. The number of cytokine-producing cells may be adjusted according, for example, to the level of cytokine produced by a given cytokine producing cellular immunotherapy.

[0152] In some embodiments, cytokine-producing cells are administered in a dose that is capable of producing at least 500 ng of GM-CSF per 24 hours per one million cells. Determination of optimal cell dosage and ratios is a matter of routine determination and within the skill of a practitioner of ordinary skill, in light of the disclosure provided herein.

[0153] In treating a lung cancer patient according to the methods described herein, the attending physician may administer lower doses of the cytokine-expressing tumor cell immunotherapy and observe the patient's response. Larger doses of the cytokine-expressing tumor cell immunotherapy may be administered until an improved therapeutic outcome is evident.

[0154] Cytokine-producing cells described herein are processed to remove most of the additional components used in preparing the cells. In particular, fetal calf serum, bovine serum components, or other biological supplements in the culture medium are removed. In one embodiment, the cells are washed, such as by repeated gentle centrifugation, into a suitable pharmacologically compatible excipient. Compatible excipients include various cell culture media, isotonic saline, with or without a physiologically compatible buffer, for example, phosphate or hepes, and nutrients such as dextrose, physiologically compatible ions, or amino acids, particularly those devoid of other immunogenic components. Carrying reagents, such as albumin and blood plasma fractions and inactive thickening agents, may also be used.

[0155] 4.7.1. Autologous Cells

[0156] The use of autologous genetically modified GM-CSF expressing cells provides advantages since each patient's tumor expresses a unique set of tumor antigens that can differ from those found on histologically-similar, MHC-matched tumor cells from another patient. See, e.g., Kawakami et al., J. Immunol., 148, 638-643 (1992); Darrow et al., J. Immunol., 142, 3329-3335 (1989); and Horn et al., J. Immunother., 10, 153-164 (1991).

[0157] In one preferred aspect, the method of treating lung cancer comprises: (a) obtaining tumor cells from a mammalian subject harboring a lung tumor; (b) genetically modifying the tumor cells to render them capable of producing an increased level of GM-CSF relative to unmodified tumor cells; (c) rendering the modified tumor cells proliferation incompetent; and (d) readministering the genetically modified tumor cells to the mammalian subject from which the tumor cells were obtained or to a mammal with the same MHC type as the mammal from which the tumor cells were obtained. The administered tumor cells are autologous and MHC-matched to the host. Preferably, the composition is administered intradermally, subcutaneously or intratumorally to the mammalian subject.

[0158] In some cases, a single autologous tumor cell may express GM-CSF alone or GM-CSF plus one or more additional transgenes. In other cases, GM-CSF and the one or more additional transgenes may be expressed by different autologous tumor cells. In one aspect of the methods provided herein, an autologous tumor cell is modified by introduction of a vector comprising a nucleic acid sequence encoding GM-CSF, operatively linked to a promoter and expression/control sequences necessary for expression thereof. In another aspect, the same autologous tumor cell or a second autologous tumor cell can be modified by introduction of a vector comprising a nucleic acid sequence encoding at least one additional transgene operatively linked to a promoter and expression/control sequences necessary for expression thereof. The nucleic acid sequence encoding the one or more transgenes can be introduced into the same or a different autologous tumor cell using the same or a different vector. The nucleic acid sequence encoding the transgene(s) may or may not further comprise a selectable marker sequence operatively linked to a promoter. Desirably, the autologous tumor cell expresses high levels of GM-CSF.

[0159] 4.7.2. Allogeneic Cells

[0160] Researchers have sought alternatives to autologous and MHC-matched cells as tumor immunotherapy, as reviewed by Jaffee et al., Seminars in Oncology, 22, 81-91 (1995). Early tumor immunotherapy strategies were based on the understanding that the vaccinating cells function as the antigen presenting cells (APCs) that present tumor antigens on their MHC class I and II molecules, and directly activate the T cell arm of the immune system. The results of Huang et al. (Science, 264, 961-965, 1994), indicate that professional APCs of the host rather than the vaccinating cells prime the T cell arm of the immune system by secreting cytokine(s) such as GM-CSF such that bone marrow-derived APCs are recruited to the region of the tumor. The bone marrow-derived APCs take up the whole cellular protein of the tumor for processing, and then present the antigenic peptide(s) on their MHC class I and II molecules, thereby priming both the CD4+ and the CD8+ T cell arms of the immune system, resulting in a systemic tumor-specific anti-tumor immune response. Without being bound by theory, these results suggest that it may not be necessary or optimal to use autologous or MHC-matched cells in order to elicit an anti-cancer immune response and that the transfer of allogeneic MHC genes (from a genetically dissimilar individual of the same species) can enhance tumor immunogenicity. More specifically, in certain cases, the rejection of tumors expressing allogeneic MHC class I molecules has resulted in enhanced systemic immune responses against subsequent challenge with the unmodified parental tumor. See, e.g., Jaffee et al., supra, and Huang et al., supra.

[0161] As used herein, a “tumor cell line” comprises cells that were initially derived from a tumor. Such cells typically exhibit indefinite growth in culture. In one aspect, the method for treating lung cancer comprises: (a) obtaining a tumor cell line; (b) genetically modifying the tumor cell line to render the cells capable of producing an increased level of a cytokine, e.g., GM-CSF, relative to the unmodified tumor cell line; (c) rendering the modified tumor cell line proliferation incompetent; and (d) administering the tumor cell line to a mammalian subject (host) having at least one tumor that is of the same type of tumor as that from which the tumor cell line was obtained. In some embodiments, the administered tumor cell line is allogeneic and is not MHC-matched to the host. Such allogeneic lines provide the advantage that they can be prepared in advance, characterized, aliquoted in vials containing known numbers of transgene (e.g., GM-CSF) expressing cells and stored (i.e. frozen) such that well characterized cells are available for administration to the patient. Methods for the production of genetically modified allogeneic cells are described for example in WO 00/72686, expressly incorporated by reference herein.

[0162] In one approach to preparing genetically modified GM-CSF expressing allogeneic cells, a nucleic acid sequence (transgene) encoding GM-CSF alone or in combination with the nucleic acid coding sequence for one or more additional transgenes is introduced into a cell line that is an allogeneic tumor cell line (i.e., derived from an individual other than the individual being treated). In another approach, a nucleic acid sequence (transgene) encoding GM-CSF alone or in combination with the nucleic acid coding sequence for one or more additional transgenes is introduced into separate allogeneic tumor cell lines. In yet another approach two or more different genetically modified allogeneic GM-CSF expressing cell lines (e.g. LNCAP and PC-3) are administered in combination, typically at a ratio of 1:1. In general, the cell or population of cells is from a tumor cell line of the same type as the tumor or cancer being treated, e.g. lung cancer. However, the cell or population of cells may be from a tumor cell line of a different type compared to the tumor or cancer being treated. The nucleic acid sequence encoding the transgene(s) may be introduced into the same or a different allogeneic tumor cell using the same or a different vector. The nucleic acid sequence encoding the transgene(s) may or may not further comprise a selectable marker sequence operatively linked to a promoter. Desirably, the allogeneic cell line expresses high levels of GM-CSF.

[0163] In another aspect, one or more genetically modified GM-CSF expressing allogeneic cell lines can be exposed to an antigen, such that the patient's immune response to the antigen is increased in the presence of GM-CSF, e.g., an allogeneic or bystander cell that has been genetically modified to express GM-CSF. Such exposure may take place ex vivo or in vivo. In one preferred embodiment, the antigen is a peptide comprising an amino acid sequence obtained from COPB2. The COPB2 peptide can be provided by (on) cells that are administered to the subject or may be provided by cells native to the patient. In such cases, the composition can be rendered proliferation-incompetent, typically by irradiation, wherein the allogeneic cells are plated in a tissue culture plate and irradiated at room temperature using a Cs source, as further described herein. An allogeneic cellular immunotherapy composition as described herein may comprise allogeneic cells plus other cells, i.e. a different type of allogeneic cell, an autologous cell, or a bystander cell that may or may not be genetically modified. If genetically modified, the different type of allogeneic cell, autologous cell, or bystander cell may express GM-CSF or another transgene. The ratio of allogeneic cells to other cells in a given administration will vary dependent upon the combination.

[0164] Any suitable route of administration can be used to introduce an allogeneic cell line composition into the patient, preferably, the composition is administered intradermally, subcutaneously or intratumorally.

[0165] The use of allogeneic cell lines in practicing the methods described herein provides the therapeutic advantage that administration of a genetically modified GM-CSF expressing cell line to a patient with cancer, together with an autologous cancer antigen, paracrine production of GM-CSF results in an effective immune response to a tumor. This obviates the need to culture and transduce autologous tumor cells for each patient.

[0166] 4.7.3. Bystander Cells

[0167] In one further aspect, a universal immunomodulatory genetically modified transgene-expressing bystander cell that expresses at least one transgene can be used in the immunotherapies described herein. The same universal bystander cell line may express more than one transgene, or individual transgenes may be expressed by different universal bystander cell lines. The universal bystander cell line comprises cells which either naturally lack major histocompatibility class I (MHC-I) antigens and major histocompatibility class II (MHC-II) antigens or have been modified so that they lack MHC-I antigens and MHC-II antigens. In one aspect, a universal bystander cell line can be modified by introduction of a vector wherein the vector comprises a nucleic acid sequence encoding a transgene, e.g., a cytokine such as GM-CSF, operably linked to a promoter and expression control sequences necessary for expression thereof. In another aspect, the same universal bystander cell line or a second universal bystander cell line is modified by introduction of a vector comprising a nucleic acid sequence encoding at least one additional transgene operatively linked to a promoter and expression control sequences necessary for expression thereof. The nucleic acid sequence encoding the transgene(s) may be introduced into the same or a different universal bystander cell line using the same or a different vector. The nucleic acid sequence encoding the transgene(s) may or may not further comprise a selectable marker sequence operatively linked to a promoter. Any combination of transgene(s) that stimulate an anti-tumor immune response can be used. The universal bystander cell line preferably grows in defined, i.e., serum-free medium, preferably as a suspension.

[0168] An example of a preferred universal bystander cell line is K562 (ATCC CCL-243; Lozzio et al., Blood 45(3): 321-334 (1975); Klein et al., Int. J. Cancer 18: 421-431 (1976)). A detailed description of the generation of human bystander cell lines is described for example in U.S. Pat. No. 6,464,973, expressly incorporated by reference herein.

[0169] Desirably, the universal bystander cell line expresses high levels of the transgene, e.g. a cytokine such as GM-CSF.

[0170] In the methods, the one or more universal bystander cell lines can be incubated with an autologous cancer antigen, e.g., provided by an autologous tumor cell (which together comprise a universal bystander cell line composition), then the universal bystander cell line composition can be administered to the patient. Any suitable route of administration can be used to introduce a universal bystander cell line composition into the patient. Preferably, the composition is administered intradermally, subcutaneously or intratumorally.

[0171] Typically, the autologous cancer antigen can be provided by a cell of the cancer to be treated, i.e., an autologous cancer cell. In such cases, the composition is rendered proliferation-incompetent by irradiation, wherein the bystander cells and cancer cells are plated in a tissue culture plate and irradiated at room temperature using a Cs source, as detailed above.

[0172] The ratio of bystander cells to autologous cancer cells in a given administration will vary dependent upon the combination. With respect to GM-CSF-producing bystander cells, the ratio of bystander cells to autologous cancer cells in a given administration should be such that a therapeutically effective level of GM-CSF is produced. In addition to the GM-CSF threshold, the ratio of bystander cells to autologous cancer cells should not be greater than 1:1. Appropriate ratios of bystander cells to tumor cells or tumor antigens can be determined using routine methods known in the art.

[0173] The use of bystander cell lines in practicing the methods described herein provides the therapeutic advantage that, through administration of a cytokine-expressing bystander cell line and at least one additional cancer therapeutic agent (expressed by the same or a different cell) to a patient with cancer, together with an autologous cancer antigen, paracrine production of an immunomodulatory cytokine, results in an effective immune response to a tumor. This obviates the need to culture and transduce autologous tumor cells for each patient.

[0174] Typically a minimum dose of about 3500 rads is sufficient to inactivate a cell and render it proliferation-incompetent, although doses up to about 30,000 rads are acceptable. In some embodiment, the cells are irradiated at a dose of from about 50 to about 200 rads/min or from about 120 to about 140 rads/min prior to administration to the mammal. Typically, when using irradiation, the levels required are 2,500 rads, 5,000 rads, 10,000 rads, 15,000 rads or 20,000 rads. In one embodiment, a dose of about 10,000 rads is used to inactivate a cell and render it proliferation-incompetent. It is understood that irradiation is but one way to render cells proliferation-incompetent, and that other methods of inactivation which result in cells incapable of multiple rounds of cell division but that retain the ability to express transgenes (e.g. cytokines) are included in the methods provided herein (e.g., treatment with mitomycin C, cycloheximide, and conceptually analogous agents, or incorporation of a suicide gene by the cell).

[0175] 4.7.4. Cytokines

[0176] A “cytokine” or grammatical equivalent, includes, without limitation, those hormones that act locally and do not circulate in the blood, and which, when used in accordance with the methods provided herein, will result in an alteration of an individual's immune response. Also included in the definition of cytokine are adhesion or accessory molecules which result in an alteration of an individual's immune response. Thus, examples of cytokines include, but are not limited to, IL-1 (a or P), IL-2, IL-3, IL-4, IL-5, IL-6, IL-7, IL-8, IL-9, IL-10, IL-11, IL-12, GM-CSF, M-CSF, G-CSF, LIF, LT, TGF-P, γ-IFN, a-EFN, P-IFN, TNF-α, BCGF, CD2, or ICAM. Descriptions of the aforementioned cytokines as well as other applicable immunomodulatory agents may be found in “Cytokines and Cytokine Receptors,” A. S. Hamblin, D. Male (ed.), Oxford University Press, New York, N.Y. (1993)), or the “Guidebook to Cytokines and Their Receptors,” N. A. Nicola (ed.), Oxford University Press, New York, N.Y. (1995)). Where therapeutic use in humans is contemplated, the cytokines will preferably be substantially similar to the human form of the protein or will have been derived from human sequences (i.e., of human origin). In one preferred embodiment, the transgene is a cytokine, such as GM-CSF.

[0177] Additionally, cytokines of other mammals with substantial structural homology and/or amino acid sequence identity to the human forms of a given cytokine, will be useful when demonstrated to exhibit similar activity on the human immune system. Similarly, proteins that are substantially analogous to any particular cytokine, but have conservative changes of protein sequence, can also be used. Thus, conservative substitutions in protein sequence may be possible without disturbing the functional abilities of the protein molecule, and thus proteins can be made that function as cytokines in the methods provided herein but have amino acid sequences that differ slightly from currently known sequences. Such conservative substitutions typically include substitutions within the following groups: glycine, alanine, valine, isoleucine, leucine; aspartic acid, glutamic acid, asparagine, glutamine; serine, threonine; lysine, arginine; and phenylalanine, tyrosine.

[0178] Granulocyte-macrophage colony stimulating factor (GM-CSF) is a cytokine produced by fibroblasts, endothelial cells, T cells and macrophages. This cytokine has been shown to induce the growth of hematopoetic cells of granulocyte and macrophage lineages. In addition, it also activates the antigen processing and presenting function of dendritic cells, which are the major antigen presenting cells (APC) of the immune system. Results from animal model experiments have convincingly shown that GM-CSF producing cells are able to induce an immune response against parental, non-transduced cells.

[0179] GM-CSF augments the antigen presentation capability of the subclass of dendritic cells (DC) capable of stimulating robust anti-tumor responses (Gasson et al. Blood 1991 Mar. 15; 77(6):1131-45; Mach et al. Cancer Res. 2000 Jun. 15; 60(12):3239-46; reviewed in Mach and Dranoff, Curr Opin Immunol. 2000 October; 12(5):571-5). See, e.g., Boon and Old, Curr Opin Immunol. 1997 Oct. 1; 9(5):681-3). Presentation of tumor antigen epitopes to T cells in the draining lymph nodes is expected to result in systemic immune responses to tumor metastases. Also, irradiated tumor cells expressing GM-CSF have been shown to function as a potent immunotherapy against tumor challenge. Localized high concentrations of certain cytokines, delivered by genetically modified cells, have been found to lead to tumor regression (Abe et al., J. Canc. Res. Clin. Oncol. 121: 587-592 (1995); Gansbacher et al., Cancer Res. 50: 7820-7825 (1990); Formi et al., Cancer and Met. Reviews 7: 289-309 (1988). PCT publication WO200072686 describes tumor cells expressing various cytokines.

[0180] In one embodiment, the cellular immunogenic composition comprises a GM-CSF coding sequence operatively linked to regulatory elements for expression in the cells of the immunotherapy. The GM-CSF coding sequence may code for a murine or human GM-CSF and may be in the form of genomic DNA (SEQ ID NO: NO.:84; disclosed as SEQ ID NO: NO.:1 in US Patent Publication NO. 2006/0057127, which is hereby incorporated by reference in its entirety) or cDNA (SEQ ID NO: NO.:85; disclosed as SEQ ID NO: NO.:2 in US Patent Publication NO. 2006/0057127, which is hereby incorporated by reference in its entirety). In the case of cDNA, the coding sequence for GM-CSF does not contain intronic sequences to be spliced out prior to translation. In contrast, for genomic GM-CSF, the coding sequence contains at least one native GM-CSF intron that is spliced out prior to translation. In one embodiment, the GM-CSF coding sequence encodes the amino acid sequence presented as SEQ ID NO.:86 (disclosed as SEQ ID NO.:3 in US Patent Publication NO. 2006/0057127, which is hereby incorporated by reference in its entirety). Other examples of GM-CSF coding sequences are found in Genbank accession numbers: AF373868, AC034228, AC034216, M 10663 and NM000758.

[0181] A GM-CSF coding sequence can be a full-length complement that hybridizes to the sequence shown in SEQ ID NO:84 or SEQ ID NO:85 under stringent conditions. The phrase “hybridizing to” refers to the binding, duplexing, or hybridizing of a molecule to a particular nucleotide sequence under stringent conditions when that sequence is present in a complex mixture (e.g., total cellular) DNA or RNA. “Bind(s) substantially” refers to complementary hybridization between a probe nucleic acid and a target nucleic acid and embraces minor mismatches that can be accommodated by reducing the stringency of the hybridization media to achieve the desired detection of the target nucleic acid sequence.

[0182] It therefore follows that the coding sequence for a cytokine such as GM-CSF, can have at least 80, 85, 87, 89, 90, 91, 92, 93, 94, 95, 96, 97, 98, 99% or more % identity over its entire length to a native GM-CSF coding sequence. For example, a GM-CSF coding sequence can have at least 80, 85, 87, 89, 90, 91, 92, 93, 94, 95, 96, 97, 98, 99% or more sequence identity to a sequence presented as SEQ ID NO: NO:9 or SEQ ID NO: NO:10, when compared and aligned for maximum correspondence, as measured a sequence comparison algorithm (as described above) or by visual inspection. In one embodiment, the given % sequence identity exists over a region of the sequences that is at least about 50 nucleotides in length. In another embodiment, the given % sequence identity exists over a region of at least about 100 nucleotides in length. In another embodiment, the given % sequence identity exists over a region of at least about 200 nucleotides in length. In another embodiment, the given % sequence identity exists over the entire length of the sequence. Preferably, the GM-CSF has authentic GM-CSF activity, e.g., can bind the GM-CSF receptor.

[0183] In some embodiments, the amino acid sequence for a cytokine such as GM-CSF has at least 80, 85, 87, 89, 90, 91, 92, 93, 94, 95, 96, 97, 98, 99% or more sequence identity to the sequence presented as SEQ ID NO: NO:86, when compared and aligned for maximum correspondence.

### 5. EXAMPLES

[0184] The methods and compositions provided herein are described by reference to the following Examples, which are offered by way of illustration and are not intended to limit the invention in any manner. Standard techniques well known in the art or the techniques specifically described below are utilized. It will be appreciated that the methods and compositions provided herein can be incorporated in the form of a variety of embodiments, only a few of which are disclosed herein. It will be apparent to the artisan that other embodiments exist and do not depart from the spirit of the methods and compositions provided herein. Thus, the described embodiments are illustrative and should not be construed as restrictive.

[0185] Exemplary methods for producing recombinant viral vectors useful for making genetically altered tumor cells that express GM-CSF, methods for using the genetically altered tumor cells that express GM-CSF in cancer therapies are extensively described in U.S. Patent Application Publication No. 2006/0057127, incorporated by reference in its entirety, and will not be reproduced below. One such therapy that has been and is being evaluated in clinical trials for treatment of lung cancer is GVAX® therapy.

### 5.1 Example 1

### Identification of Protein Targets of Host Antibody Responses Following Cell-Based Lung Cancer Immunotherapy

[0186] This example describes identification of protein targets of host antibody responses following autologous cancer immunotherapy armed with GM-CSF as described above.

[0187] The feasibility, safety and efficacy of autologous GM-CSF-secreting cancer immunotherapies have been evaluated in two clinical trials in patients with early and advanced stage non-small cell lung cancer (NSCLC). In the first of these trials, 43 patients were immunized with autologous tumor cells modified with an adenoviral vector to secrete GM-CSF. Intradermal injections of the modified tumor cells were administered 2 weeks for a total of 3-6 immunizations. Three of the 33 advanced-stage patients that were treated in this trial had durable compete tumor responses. In the second clinical trial, 52 patients received at least one immunization, and one had a near complete response in a 2 cm lung mass that remained without progression for >15 months.

[0188] Humoral patient immune responses to the autologous non-small cell lung cancer immunotherapy have been evaluated using Serological Analysis of Gene Expression Libraries (SEREX). SEREX allows for the identification of antigens which may be specifically recognized by the patients' immune system following the immunotherapy. From this technique, multiple antibody responses to proteins derived from the immunotherapy have been identified that are specifically induced or augmented following immunization.

[0189] 5.1.1. Serological Analysis of Gene Expression Libraries (SEREX)

[0190] SEREX allows the systematic cloning of tumor antigens recognized by the autoantibody repertoire of cancer patients (Sahin et al. 1995; McNeel et al. 2000; Wang et al. 2005; Dunphy et al. 2005; Qin et al. 2006). cDNA expression libraries were constructed from non-small cell lung cancer (NCIH838 and NCIH1623) and prostate cancer cell lines (PC-3 and LNCaP), packaged into lambda-phage vectors, and expressed recombinantly in E. Coli. Recombinant proteins expressed during the lytic infection of bacteria were then blotted onto nitrocellulose membranes and probed with diluted patient serum for identification of clones reactive with high-titer IgG antibodies.

[0191] This procedure was carried out for the 4 patients treated with cell-based lung cancer immunotherapy who showed complete or near complete tumor responses (described above). From the SEREX analysis of these 4 patients, multiple NCIH838/NCIH1623/LNCaP/PC-3 derived cell protein clones reactive to the patient sera post-immunotherapy were identified. Positive antigen hits from the SEREX screen were then screened against pre-immunotherapy serum to determine if the antibody response to these proteins was augmented or induced following the immunotherapy. Table 2, below, provides a compiled list of induced antibody hits (29 proteins) for all 4 patients screened by SEREX. In addition, Table 4 provides positive antigen hits (28 proteins) from the SEREX screen for which a humoral response was detected in at least 2 of the 4 responders. Table 3 provides an additional list of induced antibody hits (34 proteins) identified through SEREX screening. In Table 3, an induction is indicated by an increase in score from pre-immunotherapy serum (“pre”) to post-immunotherapy serum (“post”), whereas a reduction is indicated by a decrease in score from pre to post.

TABLE 2
Induced Antibody Hits

Pre/Post Score

| | | | | | |
|---|---|---|---|---|---|
| Library | LA (Ad) | LB (BAC) | LC (BAC) | LD (SCC) | Summary |

| Gene | PC-3 | LNCaP | H838 | H1623 | serum | plasma | plasma | plasma | Induced | Overlap | Frequency |
|---|---|---|---|---|---|---|---|---|---|---|---|
| COPB2 | | 1 | 1 | | +/++ | +/+ | +/++ | +/++ | 3 | 4 | 2 |
| EPRS | | | 1 | | +/++ | +/++ | +/+ | +/+ | 2 | 4 | 1 |
| DDX41 | | 1 | | | +/++ | ++/+++ | +/+ | +/+ | 2 | 4 | 1 |
| IRAK4 | | | | 3 | +/++ | +++/+++ | ++/+++ | −/− | 2 | 3 | 3 |
| MDH1 | | 1 | | | +/++ | +/++ | −/− | −/− | 2 | 2 | 1 |
| ZRF1 | | 1 | | | +/+ | +/++ | +/+ | +/+ | 1 | 4 | 1 |
| TOP2B | | 1 | 3 | | +/++ | +/+ | +/+ | +/+ | 1 | 4 | 4 |
| AKAP9 | | 1 | | | +/+ | ++/+++ | +/+ | +/+ | 1 | 4 | 1 |
| TMEM33 | | 1 | | | ++/+++ | +++/+++ | ++/++ | +++/+++ | 1 | 4 | 1 |
| SETD1B | | 1 | | | +/++ | +/+ | +/+ | +/+ | 1 | 4 | 1 |
| BDP1 | | 1 | | | +/++ | ++/++ | +/+ | +/+ | 1 | 4 | 1 |
| CEP290 | | | 1 | | +/+ | +/+ | ++/+++ | +/+ | 1 | 4 | 1 |
| AHNAK | 1 | | | | ++/+++ | +/+ | +/+ | −/− | 1 | 3 | 1 |
| PDAP1 | | 2 | | | +/+ | +++/+++ | ++/+++ | −/− | 1 | 3 | 2 |
| ZNF397 | | | | 1 | +/+ | +/++ | +/+ | −/− | 1 | 3 | 1 |
| SMC1A | | 1 | | | +/++ | ++/++ | +/+ | −/− | 1 | 3 | 1 |
| MYO18A | | 1 | | | +/+ | −/− | ++/+++ | +/+ | 1 | 3 | 1 |
| PALLD | | | | 1 | +/+ | ++/+++ | ++/++ | −/− | 1 | 3 | 1 |
| SASS6 | 1 | | | | +/++ | ++/++ | +/+ | −/− | 1 | 3 | 1 |
| PSAT1 | 1 | | | | +/++ | +/+ | −/− | −/− | 1 | 2 | 1 |
| VCP | | 4 | 1 | | ++/+++ | −/− | +/+ | −/− | 1 | 2 | 5 |
| BAZ2B | | | 5 | | +/++ | −/− | +/+ | −/− | 1 | 2 | 5 |
| GARNL1 | | | | 1 | +/+ | −/+ | −/− | −/− | 1 | 2 | 1 |
| Hypothetical | | | 2 | | ++/+++ | −/− | −/− | ++/++ | 1 | 2 | 2 |
| DKFZP686A01247 | | | | | | | | | | | |
| NAP1L1 | 1 | | 1 | | +/++ | −/− | −/− | −/− | 1 | 1 | 2 |
| PNMA1 | 1 | | | | ++/+++ | −/− | −/− | −/− | 1 | 1 | 1 |
| HNRPA1 | | | 1 | | +/++ | +/+ | −/− | −/− | 1 | 2 | 1 |
| PTPRF | 1 | | | | −/− | ++/+++ | −/− | −/− | 1 | 1 | 1 |
| POH1 | | | 1 | | +/++ | −/− | −/− | −/− | 1 | 1 | 1 |

TABLE 3
Induced Antibody Hits

| | | Patient | | Patient | | Patient | | Patient | | Patient | |
|---|---|---|---|---|---|---|---|---|---|---|---|
| | | A | | B | | C | | D | | E | |
| Gene | Genbank # | Pre | Post | Pre | Post | Pre | Post | Pre | Post | Pre | Post |
| RSN | NM_198240 | 2 | 2 | 1 | 2 | 3 | 3 | 1 | 2 | 1 | 2 |
| DARS2 | NM_018122 | 1 | 2 | 1 | 2 | 2 | 2 | 1 | 1 | 1 | 2 |
| KTN1 | NM_182926 | 2 | 2 | 2 | 2 | 2 | 3 | 2 | 3 | 2 | 1 |
| CENPF | NM_016343 | 3 | 2 | 1 | 2 | 1 | 1 | 1 | 1 | 1 | 2 |
| IRAK4 | NM_016123 | 1 | 2 | 3 | 2 | 2 | 3 | 1 | 1 | 0 | 0 |
| REST | NM_005612 | 1 | 1 | 1 | 3 | 1 | 1 | 1 | 1 | 1 | 1 |
| AKAP9 | NM_147171 | 1 | 1 | 1 | 2 | 2 | 2 | 1 | 1 | 2 | 2 |
| BAZ2B | NM_013450 | 2 | 3 | 1 | 1 | 3 | 3 | 1 | 1 | 1 | 1 |
| BRAP | NM_006768 | 2 | 2 | 2 | 2 | 1 | 1 | 1 | 1 | 1 | 2 |
| COPB2 | NM_004766 | 1 | 1 | 2 | 2 | 1 | 1 | 1 | 1 | 1 | 2 |
| UBTF | NM_014233 | 1 | 2 | 1 | 1 | 1 | 1 | 1 | 1 | 1 | 1 |
| TPR | NM_003292 | 1 | 1 | 1 | 1 | 2 | 3 | 1 | 1 | 1 | 1 |
| PSMD7 | NM_002811 | 1 | 2 | 0 | 0 | 1 | 1 | 1 | 1 | 2 | 2 |
| NRBF2 | NM_030759 | 0 | 0 | 0 | 0 | 1 | 1 | 3 | 2 | 1 | 2 |
| SUHW4 | NM_017661 | 2 | 3 | 1 | 1 | 1 | 1 | 0 | 0 | 0 | 0 |
| BRWD1 | NM_033656 | 2 | 1 | 0 | 0 | 2 | 3 | 0 | 0 | 0 | 0 |
| ROCK2 | NM_004850 | 0 | 0 | 3 | 1 | 1 | 1 | 0 | 0 | 1 | 2 |
| MAML3 | NM_018717 | 1 | 1 | 0 | 0 | 2 | 2 | 1 | 2 | 0 | 0 |
| $$DCCAG8 | NM_006642 | 1 | 3 | 1 | 1 | 0 | 0 | 0 | 0 | 0 | 0 |
| NAP1L1 | NM_004537 | 1 | 3 | 1 | 1 | 0 | 0 | 0 | 0 | 0 | 0 |
| FAM50A | NM_004699 | 1 | 2 | 0 | 0 | 0 | 0 | 1 | 1 | 0 | 0 |
| SLMAP | NM_007159 | 1 | 2 | 0 | 0 | 1 | 1 | 0 | 0 | 0 | 0 |
| FAF1 | NM_131917 | 0 | 0 | 1 | 2 | 0 | 0 | 0 | 0 | 1 | 1 |
| ETNK1 | NM_001039481 | 1 | 1 | 0 | 0 | 1 | 2 | 0 | 0 | 0 | 0 |
| ICA1 | NM_004968 | 1 | 3 | 0 | 0 | 0 | 0 | 0 | 0 | 0 | 0 |
| ARL6IP5 | NM_006407 | 2 | 3 | 0 | 0 | 0 | 0 | 0 | 0 | 0 | 0 |
| POLR1B | NM_019014 | 2 | 3 | 0 | 0 | 0 | 0 | 0 | 0 | 0 | 0 |
| STK39 | NM_013233 | 1 | 2 | 0 | 0 | 0 | 0 | 0 | 0 | 0 | 0 |
| UHMK1 | NM_175866 | 0 | 0 | 2 | 3 | 0 | 0 | 0 | 0 | 0 | 0 |
| CHMP4C | NM_152284 | 0 | 0 | 2 | 3 | 0 | 0 | 0 | 0 | 0 | 0 |
| ZNF397 | NM_032347 | 0 | 0 | 2 | 3 | 0 | 0 | 0 | 0 | 0 | 0 |
| TRMT5 | NM_020810 | 0 | 0 | 0 | 0 | 1 | 2 | 0 | 0 | 0 | 0 |
| RPIA | NM_144563 | 0 | 0 | 0 | 0 | 1 | 2 | 0 | 0 | 0 | 0 |
| SPATA5 | NM_145207 | 0 | 0 | 0 | 0 | 2 | 3 | 0 | 0 | 0 | 0 |

TABLE 4
Positive antigen hits detected in at least 2 of 4 responders

| | | | | Patient |
|---|---|---|---|---|
| Name | Genbank # | SEQ ID NO | Identity | overlap |
| AKAP9 | NM_147171, | SEQ ID | A kinase (PRKA) anchor | 2 |
| | NT_007933 | NO: 23; | protein (yotiao) 9 | |
| | | SEQ ID | (AKAP9), transcript | |
| | | NO: 112 | variant 1 | |
| ATRX | NM_138270, | SEQ ID | alpha | 2 |
| | NM_000489 | NO: 113; | thalassemia/mental | |
| | | SEQ ID | retardation syndrome X- | |
| | | NO: 114 | linked (RAD54 homolog, | |
| | | | S. cerevisiae) (ATRX) | |
| BAZ2B | NM_013450 | SEQ ID | bromodomain adjacent to | 2 |
| | | NO: 59 | zinc finger domain 2B | |
| | | | (BAZ2B) | |
| BRAP | NM_006768 | SEQ ID | BRCA1 associated | 2 |
| | | NO: 102 | protein (BRAP) | |
| CENPF | NM_016343 | SEQ ID | centromere protein F, | 3 |
| | | NO: 87 | 350/400ka (mitosin) | |
| | | | (CENPF) | |
| COPB2 | NM_004766 | SEQ ID | coatomer protein | 3 |
| | | NO: 2 | complex, subunit beta 2 | |
| | | | (beta prime) (COPB2) | |
| CSF2 | NM_000758 | | colony stimulating factor | 2 |
| | | | 2 (granulocyte- | |
| | | | macrophage) (CSF2) | |
| EPRS | NM_004446 | SEQ ID | glutamyl-prolyl-tRNA | 2 |
| | | NO: 4 | synthetase (EPRS) | |
| GCC2 | NM_181453 | SEQ ID | GRIP and coiled-coil | 3 |
| | | NO: 115 | domain containing 2 | |
| | | | (GCC2), transcript | |
| | | | variant 1 | |
| GOLGA4 | NM_002078 | SEQ ID | golgi autoantigen, golgin | 4 |
| | | NO: 116 | subfamily a, 4 (GOLGA4) | |
| HSP90AA1 | NM_005348 | SEQ ID | heat shock protein | 2 |
| | | NO: 117 | 90 kDa alpha (cytosolic), | |
| | | | class A member 1 | |
| | | | (HSP90AA1), transcript | |
| | | | variant 2 | |
| IRAK4 | NM_016123 | SEQ ID | interleukin-1 receptor- | 2 |
| | | NO: 8 | associated kinase 4 | |
| | | | (IRAK4) | |
| KTN1 | NM_182926 | SEQ ID | kinectin 1 (kinesin | 3 |
| | | NO: 86 | receptor) (KTN1) | |
| LRRFIP1 | NM_004735 | SEQ ID | leucine rich repeat (in | 2 |
| | | NO: 79 | FLII) interacting protein 1 | |
| | | | (LRRFIP1) | |
| MCM3 | NM_002388 | SEQ ID | MCM3 minichromosome | 2 |
| | | NO: 118 | maintenance deficient 3 | |
| | | | (S. cerevisiae) (MCM3) | |
| MPHOSPH1 | NM_016195 | SEQ ID | M-phase phosphoprotein | 2 |
| | | NO: 119 | 1 (MPHOSPH1) | |
| PARP4 | NM_006437 | SEQ ID | poly (ADP-ribose) | 2 |
| | | NO: 120 | polymerase family, | |
| | | | member 4 (PARP4) | |
| PHF3 | NM_015153 | SEQ ID | PHD finger protein 3 | 2 |
| | | NO: 121 | (PHF3) | |
| PPP1R9A | NM_017650 | SEQ ID | protein phosphatase 1, | 2 |
| | | NO: 122 | regulatory (inhibitor) | |
| | | | subunit 9A (PPP1R9A) | |
| RIOK1 | NM_031480 | SEQ ID | RIO kinase 1 (yeast) | 2 |
| | | NO: 123 | (RIOK1), transcript | |
| | | | variant 1 | |
| ROCK1 | NM_005406 | SEQ ID | Rho-associated, coiled- | 3 |
| | | NO: 124 | coil containing protein | |
| | | | kinase 1 (ROCK1) | |
| SMC2 | NM_006444 | SEQ ID | structural maintenance of | 2 |
| | | NO: 125 | chromosomes 2 (SMC2) | |
| TMF1 | NM_007114 | SEQ ID | TATA element | 3 |
| | | NO: 126 | modulatory factor 1 | |
| | | | (TMF1) | |
| TOP2B | NM_001068 | SEQ ID | topoisomerase (DNA) II | 2 |
| | | NO: 16 | beta 180 kDa (TOP2B) | |
| TWISTNB | NM_001002926 | SEQ ID | TWIST neighbor | 2 |
| | | NO: 127 | (TWISTNB) | |
| UBTF | NM_014233 | SEQ ID | upstream binding | 2 |
| | | NO: 89 | transcription factor, RNA | |
| | | | polymerase I (UBTF) | |
| ZNF638 | NM_014497 | SEQ ID | zinc finger protein 638 | 3 |
| | | NO: 128 | (ZNF638), transcript | |
| | | | variant 1 | |
| ZRF1 | NM_014377 | SEQ ID | zuotin related factor 1 | 3 |
| | | NO: 14 | (ZRF1) | |

[0192] 5.1.2. Cloning and Characterization of Antigens

[0193] Full length genes are cloned into a mammalian based expression system (e.g., a lentiviral expression plasmid) and a FLAG-tag is added at the C-terminal end to aid with detection and purification. Antibody responses to high frequency hits of proteins are determined from all trials available and the induction of antibody response is examined in correlation to survival. These responses are used for a number of applications including use as surrogate markers of immunotherapy treatment, correlation with patient survival data to provide an efficacy signature, clinical trial monitoring (biomarkers) and assay development of cell characterization marker for lot release (product characterization, comparability markers).

[0194] Following identification of proteins correlated with an antibody response in serum, antigen targets may be further characterized for the presence of a cellular immune response (T-cells) in cases for which high quality peripheral blood mononuclear cells (PBMCs) harvested from patients administered cell-based lung cancer immunotherapy are available.

[0195] 5.1.2.1 Detecting Activation of Cytotoxic T Lymphocytes in IFN-γ Assays

[0196] This example provides an exemplary method for detecting activation of cytotoxic T lymphocytes (CTLs) by monitoring IFN-γ expression by the CTLs in response to exposure to an appropriate antigen, e.g., a COPB2 peptide presented on an MHC I receptor.

[0197] First, peripheral blood monocytic cells (PBMCs) are isolated from a subject to be assessed for cellular immune response against a COPB2 peptide and CD8+ cells are isolated by fluorescence activated cell sorting (FACS). The CD8+ cells are then incubated with, e.g., T2 cells loaded with the COPB2 peptide to be assessed, produced as described above, and in the presence of suitable cytokines for expanding the CTL population.

[0198] IFN-γ release by the CTLs is measured using an IFN-γ ELISA kit (PBL-Biomedical Laboratory, Piscataway, N.J.). Briefly, purified IFN-γ as standards or culture supernates from the CTL-T2 co-culture are transferred into wells of a 96-well plate pre-coated with a monoclonal anti-human IFN-γ capture antibody and incubated for 1 h in a closed chamber at 24° C. After washing the plate with PBS/0.05% Tween 20, biotin anti-human IFN-γ antibody is added to the wells and incubated for 1 h at 24° C. The wells are washed and then developed by incubation with streptavidin horseradish peroxidase conjugate and TMB substrate solution. Stop solution is added to each well and the absorbance is determined at 450 nm with a SpectraMAX Plus plate reader (Stratagene, La Jolla, Calif.). The amount of cytokine present in the CTL culture supernatants is calculated based on the IFN-γ standard curve.

[0199] 5.1.2.2 Detecting Activation of Cytotoxic T Lymphocytes in Proliferation Assays

[0200] This example provides an exemplary method for detecting activation of cytotoxic T lymphocytes (CTLs) by CTL proliferation in response to exposure to an appropriate antigen, e.g., a COPB2 peptide presented on an MHC I receptor.

[0201] First, peripheral blood monocytic cells (PBMCs) are isolated from a subject to be assessed for cellular immune response against a COPB2 peptide and CD8+ cells are isolated by fluorescence activated cell sorting (FACS). The CD8+ cells are then incubated with, e.g., T2 cells loaded with the COPB2 peptide to be assessed, produced as described above.

[0202] Next, the samples are incubated for 12 hours, then 20 μl of 3H-thymidine is added to each well and the sample incubated for an additional 12 hours. Cells are harvested and the plate is read in a beta counter to determine the amount of unincorporated 3H-thymidine.

[0203] 5.1.2.3 Detecting Activation of Cytotoxic T Lymphocytes in Effector Assays

[0204] This example provides an exemplary method for detecting activation of cytotoxic T lymphocytes (CTLs) by monitoring lysis of cells displaying an appropriate antigen, e.g., a COPB2 peptide presented on an MHC I receptor.

[0205] The cytotoxic activity of the CTLs is measured in a standard ⁵¹Cr-release assay. Effector cells (CTLs) are seeded with ⁵¹Cr-labeled target cells (5×10³ cells/well) at various effector:target cell ratios in 96-well U-bottom microtiter plates. Plates are incubated for 4 h at 37° C., 5% CO₂. The ⁵¹Cr-release is measured in 100 μl supernatant using a Beckman LS6500 liquid scintillation counter (Beckman Coulter, Brea, Calif.). The percent specific cell lysis is calculated as [(experimental release−spontaneous release)/(maximum release−spontaneous release)]. Maximum release is obtained from detergent-released target cell counts and spontaneous release from target cell counts in the absence of effector cells.

### REFERENCES

[0206] Casiano C A, Mediavilla-Varela M, Tan E M. Tumor-associated antigen arrays for the serological diagnosis of cancer. Mol Cell Proteomics. 2006 October; 5(10):1745-59. Epub 2006 May 29. Review. PMID: 16733262.
[0207] Bradford T J, Wang X, Chinnaiyan A M. Cancer immunomics: using autoantibody signatures in the early detection of prostate cancer. Urol Oncol. 2006 May-June; 24(3):237-42. PMID: 16678056.
[0208] Qin S, Qiu W, Ehrlich J R, Ferdinand A S, Richie J P, O'leary M P, Lee M L, Liu B C. Development of a “reverse capture” autoantibody microarray for studies of antigen-autoantibody profiling. Proteomics. 2006 Apr. 5;
[0209] Wang X, Yu J, Sreekumar A, Varambally S, Shen R, Giacherio D, Mehra R, Montie J E, Pienta K J, Sanda M G, Kantoff P W, Rubin M A, Wei J T, Ghosh D, Chinnaiyan A M. Autoantibody signatures in prostate cancer. N Engl J. Med. 2005 Sep. 22; 353(12):1224-35.
[0210] Dunphy E J, McNeel D G. Antigen-specific IgG elicited in subjects with prostate cancer treated with flt3 ligand. J. Immunother. 2005 May-June; 28(3):268-75.
[0211] McNeel D G, Nguyen L D, Storer B E, Vessella R, Lange P H, Disis M L. Antibody immunity to prostate cancer associated antigens can be detected in the serum of patients with prostate cancer. J. Urol. 2000 November; 164(5):1825-9.
[0212] Sahin U, Tureci O, Schmitt H, Cochlovius B, Johannes T, Schmits R, Stenner F, Luo G, Schobert I, Pfreundschuh M. Human neoplasms elicit multiple specific immune responses in the autologous host. Proc Natl Acad Sci USA. 1995 Dec. 5; 92(25):11810-3.
[0213] Varambally S, Yu J, Laxman B, Rhodes D R, Mehra R, Tomlins S A, Shah R B, Chandran U, Monzon F A, Becich M J, Wei J T, Pienta K J, Ghosh D, Rubin M A, Chinnaiyan A M. Integrative genomic and proteomic analysis of prostate cancer reveals signatures of metastatic progression. Cancer Cell. 2005 November; 8(5):393-406.

[0214] While many specific examples have been provided, the above description is intended to illustrate rather than limit the invention. Many variations of the invention will become apparent to those skilled in the art upon review of this specification. The scope of the invention should, therefore, be determined not with reference to the above description, but instead should be determined with reference to the appended claims along with their full scope of equivalents.

[0215] All sequences referenced by accession number, publications, and patent documents cited in this application are incorporated by reference in their entirety for all purposes to the same extent as if each individual publication or patent document were so individually denoted. Citation of these documents is not an admission that any particular reference is “prior art” to this invention.

The application's sequence listing, which the Patent Office published only in electronic form, follows.

SEQUENCE LISTING (128 sequences)

SEQ ID NO: 1 - protein, 906 aa, Human
  COPB2
MPLRLDIKRKLTARSDRVKSVDLHPTEPWMLASLYNGSVCVWNHETQTLVKTFEVCDLPVRAAKFVARKNWVVTGADDMQIRVFNYNTLERVHMFEAHSDYIRCIAVHPTQPFILTSSDDMLIKLWDWDKKWSCSQVFEGHTHYVMQIVINPKDNNQFASASLDRTIKVWQLGSSSPNFTLEGHEKGVNCIDYYSGGDKPYLISGADDRLVKIWDYQNKTCVQTLEGHAQNVSCASFHPELPIIITGSEDGTVRIWHSSTYRLESTLNYGMERVWCVASLRGSNNVALGYDEGSIIVKLGREEPAMSMDANGKIIWAKHSEVQQANLKAMGDAEIKDGERLPLAVKDMGSCEIYPQTIQHNPNGRFVVVCGDGEYIIYTAMALRNKSFGSAQEFAWAHDSSEYAIRESNSIVKIFKNFKEKKSFKPDFGAESIYGGFLLGVRSVNGLAFYDWDNTELIRRIEIQPKHIFWSDSGELVCIATEESFFILKYLSEKVLAAQETHEGVTEDGIEDAFEVLGEIQEIVKTGLWVGDCFIYTSSVNRLNYYVGGEIVTIAHLDRTMYLLGYIPKDNRLYLGDKELNIISYSLLVSVLEYQTAVMRRDFSMADKVLPTIPKEQRTRVAHFLEKQGFKQQALTVSTDPEHRFELALQLGELKIAYQLAVEAESEQKWKQLAELAISKCQFGLAQECLHHAQDYGGLLLLATASGNANMVNKLAEGAERDGKNNVAFMSYFLQGKVDACLELLIRTGRLPEAAFLARTYLPSQVSRVVKLWRENLSKVNQKAAESLADPTEYENLFPGLKEAFVVEEWVKETHADLWPAKQYPLVTPNEERNVMEEGKDFQPSRSTAQQELDGKPASPTPVIVASHTANKEEKSLLELEVDLDNLELEDIDTTDINLDEDILDD

SEQ ID NO: 2 - DNA, 3067 bp, Human
  COPB2
ggtgggtttatctcaaggcctgagtagccggtaacaaacgagggttcccgggattggaccgacgcaccatgcctctgcgacttgatatcaaaagaaagctaactgctagatctgatcgagttaagagtgtggatctgcatcctacagagccatggatgttggcaagtctttacaatggcagtgtgtgtgtttggaatcatgaaacacagacactggtgaagacatttgaagtatgtgatcttcctgttcgagctgcaaagtttgttgcaaggaagaattgggttgtgacaggagcggatgacatgcagattagagtgttcaattacaatactctggagagagttcatatgtttgaagcacactcagactacattcgctgtattgctgttcatccaacccagcctttcattctaactagcagtgatgacatgcttattaagctctgggactgggataaaaaatggtcttgctcacaagtgtttgaaggacacacccattatgttatgcagattgtgatcaaccccaaagataacaatcagtttgccagtgcctctttggacaggactatcaaggtgtggcagttgggctcttcgtcaccaaacttcactttggaaggacatgagaaaggcgtgaattgcattgattactacagtggtggggacaagccatacctcatttcaggtgcagatgaccgtcttgttaaaatatgggattatcagaataaaacatgtgtgcagacactggaaggacatgcccaaaatgtgtcttgtgccagctttcatcctgagttgccaatcattatcacaggttcagaagatggaacagtacgtatttggcattcaagcacctaccggcttgagagcacactgaattatggaatggagagggtatggtgcgtggccagtctaagagggtcaaacaatgtcgctttgggctatgatgaagggagcatcattgttaagcttggtcgggaggaacctgccatgtccatggatgccaatggaaagataatttgggccaagcattcagaagtccagcaggccaacctaaaagcaatgggagatgctgaaattaaagatggtgaaagattgccactggcagtaaaggatatgggcagttgtgaaatataccctcagactattcagcacaatcctaatgggcggtttgtggtggtgtgtggtgatggggagtatatcatctacacagcaatggcattgagaaacaagagctttggatctgctcaggagtttgcatgggcccacgattcttcagagtatgcaataagagagagcaacagcattgtaaagatatttaagaactttaaggaaaaaaaatcatttaaaccagattttggagcagaaagtatctacggcggcttcttattgggagtcagatctgtaaatggcttagccttctatgactgggacaatacagaactcatacgaagaattgaaattcagcccaaacatattttctggtctgactctggagagctagtctgtattgctactgaggaatcattttttatccttaagtatctgtcagaaaaagtcttggctgcacaggaaacacatgagggagttactgaagatggcattgaagatgcctttgaggttcttggtgagattcaggaaattgtgaaaacagggctttgggtaggcgattgcttcatttacacaagttctgtgaacagattaaattattatgttggaggagaaatagtcaccattgcccacttggacaggacgatgtatctcctaggctacattcctaaagacaacaggctttatctgggggataaagaattgaacatcattagctattccctgctggtttcagtcctggaataccagacagctgtcatgcggagggactttagcatggctgataaggtccttcctaccattccaaaagaacagaggaccagagttgcacactttttggaaaagcagggcttcaagcagcaagctcttacagtatccacagatcctgagcatcgttttgagcttgctcttcagcttggagagttaaaaattgcataccagttagcagtggaagcagagtcagaacagaagtggaaacaacttgctgaacttgccattagtaaatgtcagtttggcctagcccaggagtgcctgcatcatgcacaggattatgggggcctgctgcttttggccactgcctctggaaatgctaatatggtgaacaagctagcagagggtgcggagagagatggcaaaaataatgtggcattcatgagctactttttacagggcaaggttgatgcctgcctagagctcttaattagaactggacggctgccagaagctgccttcttggcccgaacttacttacccagtcaggtttcaagggtagtgaaactctggagagagaatctctcaaaagtcaatcagaaagcagcagaatcccttgctgacccaacagagtatgaaaacctgttccctggattaaaagaagcctttgttgttgaagaatgggtgaaggaaacacatgctgatctgtggccagccaaacaatacccacttgtcacgccaaatgaagagagaaatgtcatggaagagggaaaagactttcagccctcaagatctacagctcaacaggaacttgatgggaaacctgcttctcctactccggttattgtggcctcccacacagccaacaaagaagaaaagagtttactcgaactagaagtagatttggataatttggaattagaagatattgacacaacagatatcaatctggatgaagatattttggatgattgactgtaatgctttccatttacctgactaaacagatcattattatatataggtattgattgctaccctgaccacagtgctttggactatgagaaacttcttagatttttatatgtaaatgctgtggaccactgggagcacaatgcccacatcatcttaagaagagtttatgtgcagcatttaaatcactgtgttttccttgttaactaaaacagacatgggctttgatttttttcatactattagaccatatctcataaaaccttttgaattaaaaaaaa

SEQ ID NO: 3 - protein, 1512 aa, Human
  EPRS
MATLSLTVNSGDPPLGALLAVEHVKDDVSISVEEGKENILHVSENVIFTDVNSILRYLARVATTAGLYGSNLMEHTEIDHWLEFSATKLSSCDSFTSTINELNHCLSLRTYLVGNSLSLADLCVWATLKGNAAWQEQLKQKKAPVHVKRWFGFLEAQQAFQSVGTKWDVSTTKARVAPEKKQDVGKFVELPGAEMGKVTVRFPPEASGYLHIGHAKAALLNQHYQVNFKGKLIMRFDDTNPEKEKEDFEKVILEDVAMLHIKPDQFTYTSDHFETIMKYAEKLIQEGKAYVDDTPAEQMKAEREQRIDSKHRKNPIEKNLQMWEEMKKGSQFGQSCCLRAKIDMSSNNGCMRDPTLYRCKIQPHPRTGNKYNVYPTYDFACPIVDSIEGVTHALRTTEYHDRDEQFYWIIEALGIRKPYIWEYSRLNLNNTVLSKRKLTWFVNEGLVDGWDDPRFPTVRGVLRRGMTVEGLKQFIAAQGSSRSVVNMEWDKIWAFNKKVIDPVAPRYVALLKKEVIPVNVPEAQEEMKEVAKHPKNPEVGLKPVWYSPKVFIEGADAETFSEGEMVTFINWGNLNITKIHKNADGKIISLDAKLNLENKDYKKTTKVTWLAETTHALPIPVICVTYEHLITKPVLGKDEDFKQYVNKNSKHEELMLGDPCLKDLKKGDIIQLQRRGFFICDQPYEPVSPYSCKEAPCVLIYIPDGHTKEMPTSGSKEKTKVEATKNETSAPFKERPTPSLNNNCTTSEDSLVLYNRVAVQGDVVRELKAKKAPKEDVDAAVKQLLSLKAEYKEKTGQEYKPGNPPAEIGQNISSNSSASILESKSLYDEVAAQGEVVRKLKAEKSPKAKINEAVECLLSLKAQYKEKTGKEYIPGQPPLSQSSDSSPTRNSEPAGLETPEAKVLFDKVASQGEVVRKLKTEKAPKDQVDIAVQELLQLKAQYKSLIGVEYKPVSATGAEDKDKKKKEKENKSEKQNKPQKQNDGQRKDPSKNQGGGLSSSGAGEGQGPKKQTRLGLEAKKEENLADWYSQVITKSEMIEYHDISGCYILRPWAYAIWEAIKDFFDAEIKKLGVENCYFPMFVSQSALEKEKTHVADFAPEVAWVTRSGKTELAEPIAIRPTSETVMYPAYAKWVQSHRDLPIKLNQWCNVVRWEFKHPQPFLRTREFLWQEGHSAFATMEEAAEEVLQILDLYAQVYEELLAIPVVKGRKTEKEKFAGGDYTTTIEAFISASGRAIQGGTSHHLGQNFSKMFEIVFEDPKIPGEKQFAYQNSWGLTTRTIGVMTMVHGDNMGLVLPPRVACVQVVIIPCGITNALSEEDKEALIAKCNDYRRRLLSVNIRVRADLRDNYSPGWKFNHWELKGVPIRLEVGPRDMKSCQFVAVRRDTGEKLTVAENEAETKLQAILEDIQVTLFTRASEDLKTHMVVANTMEDFQKILDSGKIVQIPFCGEIDCEDWIKKTTARDQDLEPGAPSMGAKSLCIPFKPLCELQPGAKCVCGKNPAKYYTLFGRSY

SEQ ID NO: 4 - DNA, 5021 bp, Human
  EPRS
agcacgaaaggccacgcaggccgttctaaccctggcggccaagaggaggggtagcaggctctggaacctgcgggcggggacgaagacggcgcgcgacgatgtcgcaccgcggcgtgcgcggtgtcggcagtagctgcggcgcaggggcggagcgaaggctgcggcggcgtcgggtacgcgcacacgttgcatcttcttcctttcgcggggtcctccgtagttctggcacgagccaggcgtactgacaggtggaccagcggactggtggagatggcgacgctctctctgaccgtgaattcaggagaccctccgctaggagctttgctggcagtagaacacgtgaaagacgatgtcagcatttccgttgaagaagggaaagagaatattcttcatgtttctgaaaatgtgatattcacagatgtgaattctatacttcgctacttggctagagttgcaactacagctgggttatatggctctaatctgatggaacatactgagattgatcactggttggagttcagtgctacaaaattatcttcatgtgattcctttacttctacaattaatgaactcaatcattgcctgtctctgagaacatacttagttggaaactccttgagtttagcagatttatgtgtttgggccaccctaaaaggaaatgctgcctggcaagaacagttgaaacagaagaaagctccagttcatgtaaaacgttggtttggctttcttgaagcccagcaggccttccagtcagtaggtaccaagtgggatgtttcaacaaccaaagctcgagtggcacctgagaaaaagcaagatgttgggaaatttgttgagcttccaggtgcggagatgggaaaggttaccgtcagatttcctccagaggccagtggttacttacacattgggcatgcaaaagctgctcttctgaaccagcactaccaggttaactttaaagggaaactgatcatgagatttgatgacacaaatcctgaaaaagaaaaggaagattttgagaaggttatcttggaagatgttgcaatgttgcatatcaaaccagatcaatttacttatacttcggatcattttgaaactataatgaagtatgcagagaagctaattcaagaagggaaggcttatgtggatgatactcctgctgaacagatgaaagcagaacgtgagcagaggatagactctaaacatagaaaaaaccctattgagaagaatctacaaatgtgggaagaaatgaaaaaagggagccagtttggtcagtcctgttgtttgcgagcaaaaattgacatgagtagtaacaatggatgcatgagagatccaaccctttatcgctgcaaaattcaaccacatccaagaactggaaataaatacaatgtttatccaacatatgattttgcctgccccatagttgacagcatcgaaggtgttacacatgccctgagaacaacagaataccatgacagagatgagcagttttactggattattgaagctttaggcataagaaaaccatatatttgggaatatagtcggctaaatctcaacaacacagtgctatccaaaagaaaactcacatggtttgtcaatgaaggactagtagatggatgggatgacccaagatttcctacggttcgtggtgtactgagaagagggatgacagttgaaggactgaaacagtttattgctgctcagggctcctcacgttcagtcgtgaacatggagtgggacaaaatctgggcgtttaacaaaaaggttattgacccagtggctccacgatatgttgcattactgaagaaagaagtgatcccagtgaatgtacctgaagctcaggaggagatgaaagaagtagccaaacacccaaagaatcctgaggttggcttgaagcctgtgtggtatagtcccaaagttttcattgaaggtgctgatgcagagactttttcggagggtgagatggttacatttataaattggggcaacctcaacattacaaaaatacacaaaaatgcagatggaaaaatcatatctcttgatgcaaagttgaatttggaaaacaaagactacaagaaaaccactaaggtcacttggcttgcagagactacacatgctcttcctattccagtaatctgtgtcacttatgagcacttgatcacaaagccagtgctaggaaaagacgaggactttaagcagtatgtcaacaagaacagtaagcatgaagagctaatgctaggggatccctgccttaaggatttgaaaaaaggagatattatacaactccagagaagaggattcttcatatgtgatcaaccttatgaacctgttagcccatatagttgcaaggaagccccgtgtgttttgatatacattcctgatgggcacacaaaggaaatgccaacatcagggtcaaaggaaaagaccaaagtagaagccacaaaaaatgagacctctgctccttttaaggaaagaccaacaccttctctgaataataattgtactacatctgaggattccttggtcctttacaatagagtggctgttcaaggagatgtggttcgtgaattaaaagccaagaaagcaccaaaggaagatgtagatgcagctgtaaaacagcttttgtctttgaaagctgaatataaggagaaaactggccaggaatataaacctggaaaccctcctgctgaaataggacagaatatttcttctaattcctcagcaagtattctggaaagtaaatctctgtatgatgaagttgctgcacaaggggaggtggttcgtaagctaaaagctgaaaaatcccctaaggctaaaataaatgaagctgtagaatgcttactgtccctgaaggctcagtataaagaaaaaactgggaaggagtacatacctggtcagcccccattatctcaaagttcggattcaagcccaaccagaaattctgaacctgctggtttagaaacaccagaagcgaaagtactttttgacaaagtagcttctcaaggggaagtagttcggaaacttaaaactgaaaaagcccctaaggatcaagtagatatagctgttcaagaactccttcagctaaaggcacagtacaagtctttgataggagtagagtataagcctgtgtcggccactggagctgaggacaaagataagaagaagaaagaaaaagaaaataaatctgaaaagcagaataagcctcagaaacaaaatgatggccaaaggaaagacccttctaaaaaccaaggaggtgggctctcatcaagtggagcaggagaagggcaggggcctaagaaacagaccaggttgggtcttgaggcaaaaaaagaagaaaatcttgctgattggtattctcaggtcatcacaaagtcagaaatgattgaataccatgacataagtggctgttatattcttcgtccctgggcctatgccatttgggaagccatcaaggacttttttgatgctgagatcaagaaacttggtgttgaaaactgctacttccccatgtttgtgtctcaaagtgcattagagaaagagaagactcatgttgctgactttgccccagaggttgcttgggttacaagatctggcaaaaccgagctggcagaaccaattgccattcgtcctactagtgaaacagtaatgtatcctgcatatgcaaaatgggtacagtcacacagagacctgcccatcaagctcaatcagtggtgcaatgtggtgcgttgggaattcaagcatcctcagcctttcctacgtactcgtgaatttctttggcaggaagggcacagtgcttttgctaccatggaagaggcagcggaagaggtcttgcagatacttgacttatatgctcaggtatatgaagaactcctggcaattcctgttgttaaaggaagaaagacggaaaaggaaaaatttgcaggaggagactatacaactacaatagaagcatttatatctgctagtggaagagctatccagggaggaacatcacatcatttagggcagaatttttccaaaatgtttgaaatcgtttttgaagatccaaagataccaggagagaagcaatttgcctatcaaaactcctggggcctgacaactcgaactattggtgttatgaccatggttcatggggacaacatgggtttagtattaccaccccgtgtagcatgtgttcaggtggtgattattccttgtggcattaccaatgcactttctgaagaagacaaagaagcgctgattgcaaaatgcaatgattatcgaaggcgattactcagtgttaacatccgcgttagagctgatttacgagataattattctccaggttggaaattcaatcactgggagctcaagggagttcccattagacttgaagttgggccacgtgatatgaagagctgtcagtttgtagccgtcagacgagatactggagaaaagctgacagttgctgaaaatgaggcagagactaaacttcaagctattttggaagacatccaggtcacccttttcacaagggcttctgaagaccttaagactcatatggttgtggctaatacaatggaagactttcagaagatactagattctggaaagattgttcagattccattctgtggggaaattgactgtgaggactggatcaaaaagaccactgccagggatcaagatcttgaacctggtgctccatccatgggagctaaaagcctttgcatccccttcaaaccactctgtgaactgcagcctggagccaaatgtgtctgtggcaagaaccctgccaagtactacaccttatttggtcgcagctactgagggatgaacgaaagccccctcttcaactcctctcactttttaaagcattgatattagtatcttctcagatacagaccgttttatgattttttaaaaagtaaaagttctaaaatgaagtcacacaggacaattattcttatgcctaagttaacagtggataaaagacttttctgtaaacaactccagtaataaatatcatgaactaaaaaaaa

SEQ ID NO: 5 - protein, 622 aa, Human
  DDX41
MEESEPERKRARTDEVPAGGSRSEAEDEDDEDYVPYVPLRQRRQLLLQKLLQRRRKGAAEEEQQDSGSEPRGDEDDIPLGPQSNVSLLDQHQHLKEKAEARKESAKEKQLKEEEKILESVAEGRALMSVKEMAKGITYDDPIKTSWTPPRYVLSMSEERHERVRKKYHILVEGDGIPPPIKSFKEMKFPAAILRGLKKKGIHHPTPIQIQGIPTILSGRDMIGIAFTGSGKTLVFTLPVIMFCLEQEKRLPFSKREGPYGLIICPSRELARQTHGILEYYCRLLQEDSSPLLRCALCIGGMSVKEQMETIRHGVHMMVATPGRLMDLLQKKMVSLDICRYLALDEADRMIDMGFEGDIRTIFSYFKGQRQTLLFSATMPKKIQNFAKSALVKPVTINVGRAGAASLDVIQEVEYVKEEAKMVYLLECLQKTPPPVLIFAEKKADVDAIHEYLLLKGVEAVAIHGGKDQEERTKAIEAFREGKKDVLVATDVASKGLDFPAIQHVINYDMPEEIENYVHRIGRTGRSGNTGIATTFINKACDESVLMDLKALLLEAKQKVPPVLQVLHCGDESMLDIGGERGCAFCGGLGHRITDCPKLEAMQTKQVSNIGRKDYLAHSSMDF

SEQ ID NO: 6 - DNA, 2118 bp, Human
  DDX41
cgcgcatgcgtgcagcaaagaatggaggagtcggaacccgaacggaagcgggctcgcaccgacgaggtgcctgccggaggaagccgctccgaggcggaagatgaggacgacgaggactacgtgccctatgtgccgttacggcagcgccggcagctactgctccagaagctgctgcagcgaagacgcaagggagctgcggaggaagagcagcaggacagcggtagtgaaccccggggagatgaggacgacatcccgctaggccctcagtccaacgtcagcctcctggatcagcaccagcaccttaaagagaaggctgaagcgcgcaaagagtctgccaaggagaagcagctgaaggaagaagagaagatcctggagagtgttgccgagggccgagcattgatgtcagtgaaggagatggctaagggcattacgtatgatgaccccatcaaaaccagctggactccaccccgttatgttctgagcatgtctgaagagcgacatgagcgcgtgcggaagaaataccacatcctggtggagggagacggtatcccaccacccatcaagagcttcaaggaaatgaagtttcctgcagccatcctgagaggcctgaagaagaaaggcattcaccacccaacacccattcagatccagggcatccccaccattctatctggccgtgacatgataggcatcgctttcacgggttcaggcaagacactggtgttcacgttgcccgtcatcatgttctgcctggaacaagagaagaggttacccttctcaaagcgcgaggggccctatggactcatcatctgcccctcgcgggagctggcccggcagacccatggcatcctggagtactactgccgcctgctgcaggaggacagctcaccactcctgcgctgcgccctctgcattgggggcatgtccgtgaaagagcagatggagaccatccgacacggtgtacacatgatggtggccaccccggggcgcctcatggatttgctgcagaagaagatggtcagcctagacatctgtcgctacctggccctggacgaggctgaccgcatgatcgacatgggcttcgagggtgacatccgtaccatcttctcctacttcaagggccagcgacagaccctgctcttcagtgccaccatgccgaagaagattcagaactttgctaagagtgcccttgtaaagcctgtgaccatcaatgtggggcgcgctggggctgccagcctggatgtcatccaggaggtagaatatgtgaaggaggaggccaagatggtgtacctgctcgagtgcctgcagaagacacccccgcctgtactcatctttgcagagaagaaggcagacgtggacgccatccacgagtacctgctgctcaagggggttgaggccgtagccatccatgggggcaaagaccaggaggaacggactaaggccatcgaggcattccgggagggcaagaaggatgtcctagtagccacagacgttgcctccaagggcctggacttccctgccatccagcacgtcatcaattatgacatgccagaggagattgagaactatgtacaccggattggccgcaccgggcgctcgggaaacacaggcatcgccactaccttcatcaacaaagcgtgtgatgagtcagtgctgatggacctcaaagcgctgctgctagaagccaagcagaaggtgccgcccgtgctgcaggtgctgcattgcggggatgagtccatgctggacattggaggagagcgcggctgtgccttctgcgggggcctgggtcatcggatcactgactgccccaaactcgaggctatgcagaccaagcaggtcagcaacatcggtcgcaaggactacctggcccacagctccatggacttctgagccgacagtcttcccttctctccaagaggcctcagtccccaagactgccaccagtctacacatacagcagccccctggacagaatcagcatttcagctcagctggcctggaatgggccaggctggtcctggctgcctgttccctgtgctcttcagaattactgtttttgtttccttttaccccagctgccattaaagcccaaacctctagcccaaaaaaaaaaaaaaa

SEQ ID NO: 7 - protein, 460 aa, Human
  IRAK4
MNKPITPSTYVRCLNVGLIRKLSDFIDPQEGWKKLAVAIKKPSGDDRYNQFHIRRFEALLQTGKSPTSELLFDWGTTNCTVGDLVDLLIQNEFFAPASLLLPDAVPKTANTLPSKEAITVQQKQMPFCDKDRTLMTPVQNLEQSYMPPDSSSPENKSLEVSDTRFHSFSFYELKNVTNNFDERPISVGGNKMGEGGFGVVYKGYVNNTTVAVKKLAAMVDITTEELKQQFDQEIKVMAKCQHENLVELLGFSSDGDDLCLVYVYMPNGSLLDRLSCLDGTPPLSWHMRCKIAQGAANGINFLHENHHIHRDIKSANILLDEAFTAKISDFGLARASEKFAQTVMTSRIVGTTAYMAPEALRGEITPKSDIYSFGVVLLEIITGLPAVDEHREPQLLLDIKEEIEDEEKTIEDYIDKKMNDADSTSVEAMYSGASQCRHEKKNKSPDIKKVHQLLQEMTAS

SEQ ID NO: 8 - DNA, 2817 bp, Human
  IRAK4
gttcttctgtcgccggcttcagcagcccgcgcccgggcaggaatagaagatgaacaaacccataacaccatcaacatatgtgcgctgcctcaatgttggactaattaggaagctgtcagattttattgatcctcaagaaggatggaagaagttagctgtagctattaaaaaaccatctggtgatgatagatacaatcagtttcacataaggagatttgaagcattacttcaaactggaaaaagtcccacttctgaattactgtttgactggggcaccacaaattgcacagttggtgatcttgtggatcttttgatccaaaatgaattttttgctcctgcgagtcttttgctcccagatgctgttcccaaaactgctaatacactaccttctaaagaagctataacagttcagcaaaaacagatgcctttctgtgacaaagacaggacattgatgacacctgtgcagaatcttgaacaaagctatatgccacctgactcctcaagtccagaaaataaaagtttagaagttagtgatacacgttttcacagtttttcattttatgaattgaagaatgtcacaaataactttgatgaacgacccatttctgttggtggtaataaaatgggagagggaggatttggagttgtatataaaggctacgtaaataacacaactgtggcagtgaagaagcttgcagcaatggttgacattactactgaagaactgaaacagcagtttgatcaagaaataaaagtaatggcaaagtgtcaacatgaaaacttagtagaactacttggtttctcaagtgatggagatgacctctgcttagtatatgtttacatgcctaatggttcattgctagacagactctcttgcttggatggtactccaccactttcttggcacatgagatgcaagattgctcagggtgcagctaatggcatcaattttctacatgaaaatcatcatattcatagagatattaaaagtgcaaatatcttactggatgaagcttttactgctaaaatatctgactttggccttgcacgggcttctgagaagtttgcccagacagtcatgactagcagaattgtgggaacaacagcttatatggcaccagaagctttgcgtggagaaataacacccaaatctgatatttacagctttggtgtggttttactagaaataataactggacttccagctgtggatgaacaccgtgaacctcagttattgctagatattaaagaagaaattgaagatgaagaaaagacaattgaagattatattgataaaaagatgaatgatgctgattccacttcagttgaagctatgtactctggtgctagccaatgtcggcatgaaaagaaaaataagagcccagacattaagaaggttcaccagctgctgcaagagatgacagcttcttaaaactttattgaaaaagactcttgactttttatatacacctatctcaaccatttttttaactgatttttttcctaaatattcttctttacctttaacaaggcataggctgttgcaggacagtggttattaaagcatgggttgaacttccaaaatataaaaatagagccaccatatcaacacttagccctacccattagtatcacccccagttcttacagtaatccctgagaaatctccttcaagcatcaccaaacacagtttgaaaattacagggttagcaaaaagagcctgggctgtatgtagggtggaaacactctgatctgaagcccagctgactccactactaatttgctgtaaagctttggacatacacttagctgctgtgagccactaataacattgggctaatatctgctgtgcttctctgacaggtagtcatgaaaatcaaatgatgcaaaatatatacaagcactttgtaaattgtaaaatgatacaaaatttaaagtttatagagccagttacaaaatcctattagtcatatatttatagattgtgttcacagcaatcatttaaccacaaataaaatatcccttgatgatactgccataatgatatgtccattattagattatgttacatgacaaagttgaaggaatttggcagatgcagttaaggttcctaaacaactcactttgagactgttgaaagggcctgacctaatccaagtgaaccccttgcaagaagaattctccttgtaagccttgaagaagtatgtgagagggccacattggctaaaacctaaaggtggcctctaggagatgagacctaccttccagttgtcagcaagcaggaaaaaaaaattgggacctcagttgcaaccacaaggaactgaattctgccaaaaatctgagtcagcttagaagagtactccaagcttcagatgataaccacagcctgggctgacacctggatttcagctttgcatgatcctcagtatgagaatctatctgttctgtgctggacttctaatatatagaactgtgagataatgggtcacattggctggatgtggtggctcatacctgtaaatcccagcactttgggaggccgaggcaggcagatcacctgaggtcaagagttcaagaccggcctggccaacatggtgaaaccccgtctctactaaaaatacaaaaattagacgagcgtggtggtggacacctgtagtcccagctgcttgggaggctgaggcaggagactagctggaaccagggaggtagaggttgcagtgagctgagatcgtgccactgcactccagcctgggtgacagagtgagactccatcataaataaataaataaataaatgggtcccattaagcctttaaaa

SEQ ID NO: 9 - protein, 334 aa, Human
  MDH1
MSEPIRVLVTGAAGQIAYSLLYSIGNGSVFGKDQPIILVLLDITPMMGVLDGVLMELQDCALPLLKDVIATDKEDVAFKDLDVAILVGSMPRREGMERKDLLKANVKIFKSQGAALDKYAKKSVKVIVVGNPANTNCLTASKSAPSIPKENFSCLTRLDHNRAKAQIALKLGVTANDVKNVIIWGNHSSTQYPDVNHAKVKLQGKEVGVYEALKDDSWLKGEFVTTVQQRGAAVIKARKLSSAMSAAKAICDHVRDIWFGTPEGEFVSMGVISDGNSYGVPDDLLYSFPVVIKNKTWKFVEGLPINDFSREKMDLTAKELTEEKESAFEFLSSA

SEQ ID NO: 10 - DNA, 1268 bp, Human
  MDH1
ctgactctctgaggctcattttgcagttgttgaaattgtccccgcagttttcaatcatgtctgaaccaatcagagtccttgtgactggagcagctggtcaaattgcatattcactgctgtacagtattggaaatggatctgtctttggtaaagatcagcctataattcttgtgctgttggatatcacccccatgatgggtgtcctggacggtgtcctaatggaactgcaagactgtgcccttcccctcctgaaagatgtcatcgcaacagataaagaagacgttgccttcaaagacctggatgtggccattcttgtgggctccatgccaagaagggaaggcatggagagaaaagatttactgaaagcaaatgtgaaaatcttcaaatcccagggtgcagccttagataaatacgccaagaagtcagttaaggttattgttgtgggtaatccagccaataccaactgcctgactgcttccaagtcagctccatccatccccaaggagaacttcagttgcttgactcgtttggatcacaaccgagctaaagctcaaattgctcttaaacttggtgtgactgctaatgatgtaaagaatgtcattatctggggaaaccattcctcgactcagtatccagatgtcaaccatgccaaggtgaaattgcaaggaaaggaagttggtgtttatgaagctctgaaagatgacagctggctcaagggagaatttgtcacgactgtgcagcagcgtggcgctgctgtcatcaaggctcgaaaactatccagtgccatgtctgctgcaaaagccatctgtgaccacgtcagggacatctggtttggaaccccagagggagagtttgtgtccatgggtgttatctctgatggcaactcctatggtgttcctgatgatctgctctactcattccctgttgtaatcaagaataagacctggaagtttgttgaaggtctccctattaatgatttctcacgtgagaagatggatcttactgcaaaggaactgacagaagaaaaagaaagtgcttttgaatttctttcctctgcctgactagacaatgatgttactaaatgcttcaaagctgaagaatctaaatgtcgtctttgactcaagtaccaaataataataatgctatacttaaattacttgtgaaaaacaacacattttaaagattacgtgcttcttggtacaggtttgtgaatgacagtttatcgtcatgctgttagtgtgcattctaaataaatatatattcaaatg

SEQ ID NO: 11 - protein, 213 aa, Human [sequence omitted]

SEQ ID NO: 12 - DNA, 732 bp, Human
  HIST1H1C
catcggcgctttgccacttgtacccgagtttttgattctcaacatgtccgagactgctcctgccgctcccgctgccgcgcctcctgcggagaaggcccctgtaaagaagaaggcggccaaaaaggctgggggtacgcctcgtaaggcgtctggtcccccggtgtcagagctcatcaccaaggctgtggccgcctctaaagagcgtagcggagtttctctggctgctctgaaaaaagcgttggctgccgccggctatgatgtggagaaaaacaacagccgtatcaaacttggtctcaagagcctggtgagcaagggcactctggtgcaaacgaaaggcaccggtgcttctggctcctttaaactcaacaagaaggcagcctccggggaagccaagcccaaggttaaaaaggcgggcggaaccaaacctaagaagccagttggggcagccaagaagcccaagaaggcggctggcggcgcaactccgaagaagagcgctaagaaaacaccgaagaaagcgaagaagccggccgcggccactgtaaccaagaaagtggctaagagcccaaagaaggccaaggttgcgaagcccaagaaagctgccaaaagtgctgctaaggctgtgaagcccaaggccgctaagcccaaggttgtcaagcctaagaaggcggcgcccaagaagaaataggcgaacgcctacttctaaaacccaaaaggctcttttcagagccacca

SEQ ID NO: 13 - protein, 621 aa, Human
  ZRF1
MLLLPSAADGRGTAITHALTSASTLCQVEPVGRWFEAFVKRRNRNASASFQELEDKKELSEESEDEELQLEEFPMLKTLDPKDWKNQDHYAVLGLGHVRYKATQRQIKAAHKAMVLKHHPDKRKAAGEPIKEGDNDYFTCITKAYEMLSDPVKRRAFNSVDPTFDNSVPSKSEAKDNFFEVFTPVFERNSRWSNKKNVPKLGDMNSSFEDVDIFYSFWYNFDSWREFSYLDEEEKEKAECRDERRWIEKQNRATRAQRKKEEMNRIRTLVDNAYSCDPRIKKFKEEEKAKKEAEKKAKAEAKRKEQEAKEKQRQAELEAARLAKEKEEEEVRQQALLAKKEKDIQKKAIKKERQKLRNSCKTWNHFSDNEAERVKMMEEVEKLCDRLELASLQCLNETLTSCTKEVGKAALEKQIEEINEQIRKEKEEAEARMRQASKNTEKSTGGGGNGSKNWSEDDLQLLIKAVNLFPAGTNSRWEVIANYMNIHSSSGVKRTAKDVIGKAKSLQKLDPHQKDDINKKAFDKFKKEHGVVPQADNATPSERFEGPYTDFTPWTTEEQKLLEQALKTYPVNTPERWEKIAEAVPGRTKKDCMKRYKELVEMVKAKKAAQEQVLNASRAKK

SEQ ID NO: 14 - DNA, 2212 bp, Human
  ZRF1
agccggatctcagtcagtatagaactaggttaccgcacacgttggcgggggtgggagggtgtgagactggcctccacaccacgaaagatccatcccggaagtgcttactggtcgtctccatgcgccggttcctgggcgtcttagagccaaggcgcgaggctcggagtgagaggtagagctggaggggaccctaagcgccctccgcccgggacgtgagccgctgcgcccaccgggctagacccggcgccatcatgctgcttctgccaagcgccgcggacggccggggcaccgccatcacccacgctctgacctctgcctctacactctgtcaagttgaacctgtgggaagatggtttgaagcttttgttaagaggagaaacagaaatgcttctgcctcttttcaggaactggaggataagaaagagttatccgaggaatcagaagatgaagaattgcagttggaagagtttcccatgctgaaaacacttgatcccaaagactggaagaaccaagatcattatgcagttcttggacttggccatgtgagatacaaggctacacagagacagatcaaagcagctcataaagcaatggttttaaaacatcacccagacaaacggaaagcagctggtgaaccaataaaagaaggagataatgactacttcacttgcataactaaagcttatgaaatgttatctgatccagtgaaaagacgagcatttaacagtgtagatcctacttttgataactcagttccttctaaaagtgaagcaaaggataatttcttcgaagtgtttaccccagtgtttgaaaggaattccagatggtcaaataaaaaaaatgttcctaaacttggtgatatgaattcatcatttgaagatgtagatatattttattctttctggtataattttgattcttggagagaattttcttatttagatgaagaagaaaaagaaaaagcagaatgtcgtgatgagaggagatggattgaaaagcagaacagagcaacaagagcacaaagaaaaaaagaagaaatgaacagaataagaacattagttgacaatgcatacagctgtgatccaaggataaaaaagttcaaggaagaagaaaaagccaagaaagaagcagaaaagaaagcaaaagcagaagctaaacggaaggagcaagaagctaaagaaaaacaaagacaagctgaattagaagctgctcggttagctaaggagaaagaagaggaggaagtcagacagcaagcattgctggcaaagaaggaaaaagatatccagaaaaaagccattaagaaggaaaggcaaaaacttcgaaactcatgcaagacctggaatcatttttctgataatgaggcagagcgggttaaaatgatggaagaagtggaaaaactttgtgatcggcttgaactggcaagcttacagtgcttgaatgaaacactcacatcatgcacaaaagaagtaggaaaggctgctttggaaaaacagatagaagaaataaatgagcaaatcagaaaagagaaagaggaagctgaggctcgtatgcgacaagcatctaagaacacagagaaatcaactggtggaggtggaaatggaagtaaaaattggtcagaagatgatctacaattactaattaaagctgtgaatctgttccctgctggaacaaattcaagatgggaagttattgctaattacatgaacatacattcttcctctggagtcaaaagaactgccaaagatgttattggcaaagcaaagagtctccaaaaacttgaccctcatcaaaaagatgacataaataaaaaggcatttgataagttcaaaaaagaacatggagtggtacctcaagcagacaacgcaacgccttcagaacgatttgaaggtccatatacagacttcaccccttggacaacagaagaacagaagcttttggaacaagctttgaaaacatacccagtaaatacacctgaaagatgggaaaaaatagcagaagcggtgcctggcaggacaaagaaggactgcatgaaacgatacaaggaacttgtcgagatggtaaaagcaaagaaagctgctcaagaacaagtgctgaatgcaagtagagccaagaaatgacaatctttgttgtgtgtgcatttttataataaaactgaaaatactgtaaacattttcattcttaaaattatactcatggtaataatttgaaagta

SEQ ID NO: 15 - protein, 1621 aa, Human
  TOP2B
MAKSGGCGAGAGVGGGNGALTWVNNAAKKEESETANKNDSSKKLSVERVYQKKTQLEHILLRPDTYIGSVEPLTQFMWVYDEDVGMNCREVTFVPGLYKIFDEILVNAADNKQRDKNMTCIKVSIDPESNIISIWNNGKGIPVVEHKVEKVYVPALIFGQLLTSSNYDDDEKKVTGGRNGYGAKLCNIFSTKFTVETACKEYKHSFKQTWMNNMMKTSEAKIKHFDGEDYTCITFQPDLSKFKMEKLDKDIVALMTRRAYDLAGSCRGVKVMFNGKKLPVNGFRSYVDLYVKDKLDETGVALKVIHELANERWDVCLTLSEKGFQQISFVNSIATTKGGRHVDYVVDQVVGKLIEVVKKKNKAGVSVKPFQVKNHIWVFINCLIENPTFDSQTKENMTLQPKSFGSKCQLSEKFFKAASNCGIVESILNWVKFKAQTQLNKKCSSVKYSKIKGIPKLDDANDAGGKHSLECTLILTEGDSAKSLAVSGLGVIGRDRYGVFPLRGKILNVREASHKQIMENAEINNIIKIVGLQYKKSYDDAESLKTLRYGKIMIMTDQDQDGSHIKGLLINFIHHNWPSLLKHGFLEEFITPIVKASKNKQELSFYSIPEFDEWKKHIENQKAWKIKYYKGLGTSTAKEAKEYFADMERHRILFRYAGPEDDAAITLAFSKKKIDDRKEWLTNFMEDRRQRRLHGLPEQFLYGTATKHLTYNDFINKELILFSNSDNERSIPSLVDGFKPGQRKVLFTCFKRNDKREVKVAQLAGSVAEMSAYHHGEQALMMTIVNLAQNFVGSNNINLLQPIGQFGTRLHGGKDAASPRYIFTMLSTLARLLFPAVDDNLLKFLYDDNQRVEPEWYIPIIPMVLINGAEGIGTGWACKLPNYDAREIVNNVRRMLDGLDPHPMLPNYKNFKGTIQELGQNQYAVSGEIFVVDRNTVEITELPVRTWTQVYKEQVLEPMLNGTDKTPALISDYKEYHTDTTVKFVVKMTEEKLAQAEAAGLHKVFKLQTTLTCNSMVLFDHMGCLKKYETVQDILKEFFDLRLSYYGLRKEWLVGMLGAESTKLNNQARFILEKIQGKITIENRSKKDLIQMLVQRGYESDPVKAWKEAQEKAAEEDETQNQHDDSSSDSGTPSGPDFNYILNMSLWSLTKEKVEELIKQRDAKGREVNDLKRKSPSDLWKEDLAAFVEELDKVESQEREDVLAGMSGKAIKGKVGKPKVKKLQLEETMPSPYGRRIIPEITAMKADASKKLLKKKKGDLDTAAVKVEFDEEFSGAPVEGAGEEALTPSVPINKGPKPKREKKEPGTRVRKTPTSSGKPSAKKVKKRNPWSDDESKSESDLEETEPVVIPRDSLLRRAAAERPKYTFDFSEEEDDDADDDDDDNNDLEELKVKASPITNDGEDEFVPSDGLDKDEYTFSPGKSKATPEKSLHDKKSQDFGNLFSFPSYSQKSEDDSAKFDSNEEDSASVFSPSFGLKQTDKVPSKTVAAKKGKPSSDTVPKPKRAPKQKKVVEAVNSDSDSEFGIPKKTTTPKGKGRGAKKRKASGSENEGDYNPGRKTSKTTSKKPKKTSFDQDSDVDIFPSDFPTEPPSLPRTGRARKEVKYFAESDEEEDDVDFAMFN

SEQ ID NO: 16 - DNA, 5189 bp, Human
  TOP2B
atggccaagtcgggtggctgcggcgcgggagccggcgtgggcggcggcaacggggcactgacctgggtgaacaatgctgcaaaaaaagaagagtcagaaactgccaacaaaaatgattcttcaaagaagttgtctgttgagagagtgtatcagaagaagacacaacttgaacacattcttcttcgtcctgatacatatattgggtcagtggagccattgacgcagttcatgtgggtgtatgatgaagatgtaggaatgaattgcagggaggttacctttgtgccaggtttatacaagatctttgatgaaattttggttaatgctgctgacaataaacagagggataagaacatgacttgtattaaagtttctattgatcctgaatctaacattataagcatttggaataatgggaaaggcattccagtagtagaacacaaggtagagaaagtttatgttcctgctttaatttttggacagcttttaacatccagtaactatgatgatgatgagaaaaaagttacaggtggtcgtaatggttatggtgcaaaactttgtaatattttcagtacaaagtttacagtagaaacagcttgcaaagaatacaaacacagttttaagcagacatggatgaataatatgatgaagacttctgaagccaaaattaaacattttgatggtgaagattacacatgcataacattccaaccagatctgtccaaatttaagatggaaaaacttgacaaggatattgtggccctcatgactagaagggcatatgatttggctggttcgtgtagaggggtcaaggtcatgtttaatggaaagaaattgcctgtaaatggatttcgcagttatgtagatctttatgtgaaagacaaattggatgaaactggggtggccctgaaagttattcatgagcttgcaaatgaaagatgggatgtttgtctcacattgagtgaaaaaggattccagcaaatcagctttgtaaatagtattgcaactacaaaaggtggacggcacgtggattatgtggtagatcaagttgttggtaaactgattgaagtagttaagaaaaagaacaaagctggtgtatcagtgaaaccatttcaagtaaaaaaccatatatgggtttttattaattgccttattgaaaatccaacttttgattctcagactaaggaaaacatgactctgcagcccaaaagttttgggtctaaatgccagctgtcagaaaaattttttaaagcagcctctaattgtggcattgtagaaagtatcctgaactgggtgaaatttaaggctcagactcagctgaataagaagtgttcatcagtaaaatacagtaaaatcaaaggtattcccaaactggatgatgctaatgatgctggtggtaaacattccctggagtgtacactgatattaacagagggagactctgccaaatcactggctgtgtctggattaggtgtgattggacgagacagatacggagtttttccactcaggggcaaaattcttaatgtacgggaagcttctcataaacagatcatggaaaatgctgaaataaataatattattaaaatagttggtctacaatataagaaaagttacgatgatgcagaatctctgaaaaccttacgctatggaaagattatgattatgaccgatcaggatcaagatggttctcacataaaaggcctgcttattaatttcatccatcacaattggccatcacttttgaagcatggttttcttgaagagttcattactcctattgtaaaggcaagcaaaaataagcaggaactttccttctacagtattcctgaatttgacgaatggaaaaaacatatagaaaaccagaaagcctggaaaataaagtactataaaggattgggtactagtacagctaaagaagcaaaggaatattttgctgatatggaaaggcatcgcatcttgtttagatatgctggtcctgaagatgatgctgccattaccttggcatttagtaagaagaagattgatgacagaaaagaatggttaacaaattttatggaagaccggagacagcgtaggctacatggcttaccagagcaatttttatatggtactgcaacaaagcatttgacttataatgatttcatcaacaaggaattgattctcttctcaaactcagacaatgaaagatctataccatctcttgttgatggctttaaacctggccagcggaaagttttatttacctgtttcaagaggaatgataaacgtgaagtaaaagttgcccagttggctggctctgttgctgagatgtcggcttatcatcatggagaacaagcattgatgatgactattgtgaatttggctcagaactttgtgggaagtaacaacattaacttgcttcagcctattggtcagtttggaactcggcttcatggtggcaaagatgctgcaagccctcgttatattttcacaatgttaagcactttagcaaggctactttttcctgctgtggatgacaacctccttaagttcctttatgatgataatcaacgtgtagagcctgagtggtatattcctataattcccatggttttaataaatggtgctgagggcattggtactggatgggcttgtaaactacccaactatgatgctagggaaattgtgaacaatgtcagacgaatgctagatggcctggatcctcatcccatgcttccaaactacaaaaactttaaaggcacgattcaagaacttggtcaaaaccagtatgcagtcagtggtgaaatatttgtagtggacagaaacacagtagaaattacagagcttccagttagaacttggacacaggtatataaagaacaggttttagaacctatgctaaatggaacagataaaacaccagcattaatttctgattataaagaatatcatactgacacaactgtgaaatttgtggtgaaaatgactgaagagaaactagcacaagcagaagctgctggactgcataaagtttttaaacttcaaactactcttacttgtaattccatggtactttttgatcatatgggatgtctgaagaaatatgaaactgtgcaagacattctgaaagaattctttgatttacgattaagttattacggtttacgtaaggagtggcttgtgggaatgttgggagcagaatctacaaagcttaacaatcaagcccgtttcattttagagaagatacaagggaaaattactatagagaataggtcaaagaaagatttgattcaaatgttagtccagagaggttatgaatctgacccagtgaaagcctggaaagaagcacaagaaaaggcagcagaagaggatgaaacacaaaaccagcatgatgatagttcctccgattcaggaactccttcaggcccagattttaattatattttaaatatgtctctgtggtctcttactaaagaaaaagttgaagaactgattaaacagagagatgcaaaagggcgagaggtcaatgatcttaaaagaaaatctccttcagatctttggaaagaggatttagcggcatttgttgaagaactggataaagtggaatctcaagaacgagaagatgttctggctggaatgtctggaaaagcaattaaaggtaaagttggcaaacctaaggtgaagaaactccagttggaagagacaatgccctcaccttatggcagaagaataattcctgaaattacagctatgaaggcagatgccagcaaaaagttgctgaagaagaagaagggtgatcttgatactgcagcagtaaaagtggaatttgatgaagaattcagtggagcaccagtagaaggtgcaggagaagaggcattgactccatcagttcctataaataaaggtcccaaacctaagagggagaagaaggagcctggtaccagagtgagaaaaacacctacatcatctggtaaacctagtgcaaagaaagtgaagaaacggaatccttggtcagatgatgaatccaagtcagaaagtgatttggaagaaacagaacctgtggttattccaagagattctttgcttaggagagcagcagccgaaagacctaaatacacatttgatttctcagaagaagaggatgatgatgctgatgatgatgatgatgacaataatgatttagaggaattgaaagttaaagcatctcccataacaaatgatggggaagatgaatttgttccttcagatgggttagataaagatgaatatacattttcaccaggcaaatcaaaagccactccagaaaaatctttgcatgacaaaaaaagtcaggattttggaaatctcttctcatttccttcatattctcagaagtcagaagatgattcagctaaatttgacagtaatgaagaagattctgcttctgttttttcaccatcatttggtctgaaacagacagataaagttccaagtaaaacggtagctgctaaaaagggaaaaccgtcttcagatacagtccctaagcccaagagagccccaaaacagaagaaagtagtagaggctgtaaactctgactcggattcagaatttggcattccaaagaagactacaacaccaaaaggtaaaggccgaggggcaaagaaaaggaaagcatctggctctgaaaatgaaggcgattataaccctggcaggaaaacatccaaaacaacaagcaagaaaccgaagaagacatcttttgatcaggattcagatgtggacatcttcccctcagacttccctactgagccaccttctctgccacgaaccggtcgggctaggaaagaagtaaaatattttgcagagtctgatgaagaagaagatgatgttgattttgcaatgtttaattaagtgcccaaagagcacaaacatttttcaacaaatatcttgtgttgtccttttgtcttctctgtctcagacttttgtacatctggcttattttaatgtgatgatgtaattgacggttttttattattgtggtaggccttttaacattttgttcttacacatacagttttatgctcttttttactcattgaaatgtcacgtactgtctgattggcttgtagaattgttatagactgccgtgcattagcacagattttaattgtcatggttacaaactacagacctgctttttgaaatgaaatttaaacattaaaaatggaactgtg

SEQ ID NO: 17 - protein, 3907 aa, Human
  AKAP9
MEDEERQKKLEAGKAKLAQFRQRKAQSDGQSPSKKQKKKRKTSSSKHDVSAHHDLNIDQSQCNEMYINSSQRVESTVIPESTIMRTLHSGEITSHEQGFSVELESEISTTADDCSSEVNGCSFVMRTGKPTNLLREEEFGVDDSYSEQGAQDSPTHLEMMESELAGKQHEIEELNRELEEMRVTYGTEGLQQLQEFEAAIKQRDGIITQLTANLQQARREKDETMREFLELTEQSQKLQIQFQQLQASETLRNSTHSSTAADLLQAKQQILTHQQQLEEQDHLLEDYQKKKEDFTMQISFLQEKIKVYEMEQDKKVENSNKEEIQEKETIIEELNTKIIEEEKKTLELKDKLTTADKLLGELQEQIVQKNQEIKNMKLELTNSKQKERQSSEEIKQLMGTVEELQKRNHKDSQFETDIVQRMEQETQRKLEQLRAELDEMYGQQIVQMKQELIRQHMAQMEEMKTRHKGEMENALRSYSNITVNEDQIKLMNVAINELNIKLQDTNSQKEKLKEELGLILEEKCALQRQLEDLVEELSFSREQIQRARQTIAEQESKLNEAHKSLSTVEDLKAEIVSASESRKELELKHEAEVTNYKIKLEMLEKEKNAVLDRMAESQEAELERLRTQLLFSHEEELSKLKEDLEIEHRINIEKLKDNLGIHYKQQIDGLQNEMSQKIETMQFEKDNLITKQNQLILEISKLKDLQQSLVNSKSEEMTLQINELQKEIEILRQEEKEKGTLEQEVQELQLKTELLEKQMKEKENDLQEKFAQLEAENSILKDEKKTLEDMLKIHTPVSQEERLIFLDSIKSKSKDSVWEKEIEILIEENEDLKQQCIQLNEEIEKQRNTFSFAEKNFEVNYQELQEEYACLLKVKDDLEDSKNKQELEYKSKLKALNEELHLQRINPTTVKMKSSVFDEDKTFVAETLEMGEVVEKDTTELMEKLEVTKREKLELSQRLSDLSEQLKQKHGEISFLNEEVKSLKQEKEQVSLRCRELEIIINHNRAENVQSCDTQVSSLLDGVVTMTSRGAEGSVSKVNKSFGEESKIMVEDKVSFENMTVGEESKQEQLILDHLPSVTKESSLRATQPSENDKLQKELNVLKSEQNDLRLQMEAQRICLSLVYSTHVDQVREYMENEKDKALCSLKEELIFAQEEKIKELQKIHQLELQTMKTQETGDEGKPLHLLIGKLQKAVSEECSYFLQTLCSVLGEYYTPALKCEVNAEDKENSGDYISENEDPELQDYRYEVQDFQENMHTLLNKVTEEYNKLLVLQTRLSKIWGQQTDGMKLEFGEENLPKEETEFLSIHSQMTNLEDIDVNHKSKLSSLQDLEKTKLEEQVQELESLISSLQQQLKETEQNYEAEIHCLQKRLQAVSESTVPPSLPVDSVVITESDAQRTMYPGSCVKKNIDGTIEFSGEFGVKEETNIVKLLEKQYQEQLEEEVAKVIVSMSIAFAQQTELSRISGGKENTASSKQAHAVCQQEQHYFNEMKLSQDQIGFQTFETVDVKFKEEFKPLSKELGEHGKEILLSNSDPHDIPESKDCVLTISEEMFSKDKTFIVRQSIHDEISVSSMDASRQLMLNEEQLEDMRQELVRQYQEHQQATELLRQAHMRQMERQREDQEQLQEEIKRLNRQLAQRSSIDNENLVSERERVLLEELEALKQLSLAGREKLCCELRNSSTQTQNGNENQGEVEEQTFKEKELDRKPEDVPPEILSNERYALQKANNRLLKILLEVVKTTAAVEETIGRHVLGILDRSSKSQSSASLIWRSEAEASVKSCVHEEHTRVTDESIPSYSGSDMPRNDINMWSKVTEEGTELSQRLVRSGFAGTEIDPENEELMLNISSRLQAAVEKLLEAISETSSQLEHAKVTQTELMRESFRQKQEATESLKCQEELRERLHEESRAREQLAVELSKAEGVIDGYADEKTLFERQIQEKTDIIDRLEQELLCASNRLQELEAEQQQIQEERELLSRQKEAMKAEAGPVEQQLLQETEKLMKEKLEVQCQAEKVRDDLQKQVKALEIDVEEQVSRFIELEQEKNTELMDLRQQNQALEKQLEKMRKFLDEQAIDREHERDVFQQEIQKLEQQLKVVPRFQPISEHQTREVEQLANHLKEKTDKCSELLLSKEQLQRDIQERNEEIEKLEFRVRELEQALLVSADTFQKVEDRKHFGAVEAKPELSLEVQLQAERDAIDRKEKEITNLEEQLEQFREELENKNEEVQQLHMQLEIQKKESTTRLQELEQENKLFKDDMEKLGLAIKESDAMSTQDQHVLFGKFAQIIQEKEVEIDQLNEQVTKLQQQLKITTDNKVIEEKNELIRDLETQIECLMSDQECVKRNREEEIEQLNEVIEKLQQELANIGQKTSMNAHSLSEEADSLKHQLDVVIAEKLALEQQVETANEEMTFMKNVLKETNFKMNQLTQELFSLKRERESVEKIQSIPENSVNVAIDHLSKDKPELEVVLTEDALKSLENQTYFKSFEENGKGSIINLETRLLQLESTVSAKDLELTQCYKQIKDMQEQGQFETEMLQKKIVNLQKIVEEKVAAALVSQIQLEAVQEYAKFCQDNQTISSEPERTNIQNLNQLREDELGSDISALTLRISELESQVVEMHTSLILEKEQVEIAEKNVLEKEKKLLELQKLLEGNEKKQREKEKKRSPQDVEVLKTTTELFHSNEESGFFNELEALRAESVATKAELASYKEKAEKLQEELLVKETNMTSLQKDLSQVRDHLAEAKEKLSILEKEDETEVQESKKACMFEPLPIKLSKSIASQTDGTLKISSSNQTPQILVKNAGIQINLQSECSSEEVTEIISQFTEKIEKMQELHAAEILDMESRHISETETLKREHYVAVQLLKEECGTLKAVIQCLRSKEGSSIPELAHSDAYQTREICSSDSGSDWGQGIYLTHSQGFDIASEGRGEESESATDSFPKKIKGLLRAVHNEGMQVLSLTESPYSDGEDHSIQQVSEPWLEERKAYINTISSLKDLITKMQLQREAEVYDSSQSHESFSDWRGELLLALQQVFLEERSVLLAAFRTELTALGTTDAVGLLNCLEQRIQEQGVEYQAAMECLQKADRRSLLSEIQALHAQMNGRKITLKREQESEKPSQELLEYNIQQKQSQMLEMQVELSSMKDRATELQEQLSSEKMVVAELKSELAQTKLELETTLKAQHKHLKELEAFRLEVKDKTDEVHLLNDTLASEQKKSRELQWALEKEKAKLGRSEERDKEELEDLKFSLESQKQRNLQLNLLLEQQKQLLNESQQKIESQRMLYDAQLSEEQGRNLELQVLLESEKVRIREMSSTLDRERELHAQLQSSDGTGQSRPPLPSEDLLKELQKQLEEKHSRIVELLNETEKYKLDSLQTRQQMEKDRQVHRKTLQTEQEANTEGQKKMHELQSKVEDLQRQLEEKRQQVYKLDLEGQRLQGIMQEFQKQELEREEKRESRRILYQNLNEPTTWSLTSDRTRNWVLQQKIEGETKESNYAKLIEMNGGGTGCNHELEMIRQKLQCVASKLQVLPQKASERLQFETADDEDFIWVQENIDEIILQLQKLTGQQGEEPSLVSPSTSCGSLTERLLRQNAELTGHISQLTEEKNDLRNMVMKLEEQIRWYRQTGAGRDNSSRFSLNGGANIEAIIASEKEVWNREKLTLQKSLKRAEAEVYKLKAELRNDSLLQTLSPDSEHVTLKRIYGKYLRAESFRKALIYQKKYLLLLLGGFQECEDATLALLARMGGQPAFTDLEVITNRPKGFTRFRSAVRVSIAISRMKFLVRRWHRVTGSVSININRDGFGLNQGAEKTDSFYHSSGGLELYGEPRHTTYRSRSDLDYIRSPLPFQNRYPGTPADFNPGSLACSQLQNYDPDRALTDYITRLEALQRRLGTIQSGSTTQFHAGMRR

SEQ ID NO: 18 - protein, 1655 aa, Human
  AKAP9
MEDEERQKKLEAGKAKIEELSLAFLVRQLAQFRQRKAQSDGQSPSKKQKKKRKTSSSKHDVSAHHDLNIDQSQCNEMYINSSQRVESTVIPESTIMRTLHSGEITSHEQGFSVELESEISTTADDCSSEVNGCSFVMRTGKPTNLLREEEFGVDDSYSEQGAQDSPTHLEMMESELAGKQHEIEELNRELEEMRVTYGTEGLQQLQEFEAAIKQRDGIITQLTANLQQARREKDETMREFLELTEQSQKLQIQFQQLQASETLRNSTHSSTAADLLQAKQQILTHQQQLEEQDHLLEDYQKKKEDFTMQISFLQEKIKVYEMEQDKKVENSNKEEIQEKETIIEELNTKIIEEEKKTLELKDKLTTADKLLGELQEQIVQKNQEIKNMKLELTNSKQKERQSSEEIKQLMGTVEELQKRNHKDSQFETDIVQRMEQETQRKLEQLRAELDEMYGQQIVQMKQELIRQHMAQMEEMKTRHKGEMENALRSYSNITVNEDQIKLMNVAINELNIKLQDTNSQKEKLKEELGLILEEKCALQRQLEDLVEELSFSREQIQRARQTIAEQESKLNEAHKSLSTVEDLKAEIVSASESRKELELKHEAEVTNYKIKLEMLEKEKNAVLDRMAESQEAELERLRTQLLFSHEEELSKLKEDLEIEHRINIEKLKDNLGIHYKQQIDGLQNEMSQKIETMQFEKDNLITKQNQLILEISKLKDLQQSLVNSKSEEMTLQINELQKEIEILRQEEKEKGTLEQEVQELQLKTELLEKQMKEKENDLQEKFAQLEAENSILKDEKKTLEDMLKIHTPVSQEERLIFLDSIKSKSKDSVWEKEIEILIEENEDLKQQCIQLNEEIEKQRNTFSFAEKNFEVNYQELQEEYACLLKVKDDLEDSKNKQELEYKSKLKALNEELHLQRINPTTVKMKSSVFDEDKTFVAETLEMGEVVEKDTTELMEKLEVTKREKLELSQRLSDLSEQLKQKHGEISFLNEEVKSLKQEKEQVSLRCRELEIIINHNRAENVQSCDTQVSSLLDGVVTMTSRGAEGSVSKVNKSFGEESKIMVEDKVSFENMTVGEESKQEQLILDHLPSVTKESSLRATQPSENDKLQKELNVLKSEQNDLRLQMEAQRICLSLVYSTHVDQVREYMENEKDKALCSLKEELIFAQEEKIKELQKIHQLELQTMKTQETGDEGKPLHLLIGKLQKAVSEECSYFLQTLCSVLGEYYTPALKCEVNAEDKENSGDYISENEDPELQDYRYEVQDFQENMHTLLNKVTEEYNKLLVLQTRLSKIWGQQTDGMKLEFGEENLPKEETEFLSIHSQMTNLEDIDVNHKSKLSSLQDLEKTKLEEQVQELESLISSLQQQLKETEQNYEAEIHCLQKRLQAVSESTVPPSLPVDSVVITESDAQRTMYPGSCVKKNIDGTIEFSGEFGVKEETNIVKLLEKQYQEQLEEEVAKVIVSMSIAFAQQTELSRISGGKENTASSKQAHAVCQQEQHYFNEMKLSQDQIGFQTFETVDVKFKEEFKPLSKELGEHGKEILLSNSDPHDIPESKDCVLTISEEMFSKDKTFIVRQSIHDEISVSSMDASRQLMLNEEQLEDMRQELVRQYQEHQQATELLRQAHMRQMERQREDQEQLQEEIKRLNRQLAQVRVL

SEQ ID NO: 19 - protein, 3911 aa, Human
  AKAP9
MEDEERQKKLEAGKAKIEELSLAFLVRQLAQFRQRKAQSDGQSPSKKQKKKRKTSSSKHDVSAHHDLNIDQSQCNEMYINSSQRVESTVIPESTIMRTLHSGEITSHEQGFSVELESEISTTADDCSSEVNGCSFVMRTGKPTNLLREEEFGVDDSYSEQGAQDSPTHLEMMESELAGKQHEIEELNRELEEMRVTYGTEGLQQLQEFEAAIKQRDGIITQLTANLQQARREKDETMREFLELTEQSQKLQIQFQQLQASETLRNSTHSSTAADLLQAKQQILTHQQQLEEQDHLLEDYQKKKEDFTMQISFLQEKIKVYEMEQDKKVENSNKEEIQEKETIIEELNTKIIEEEKKTLELKDKLTTADKLLGELQEQIVQKNQEIKNMKLELTNSKQKERQSSEEIKQLMGTVEELQKRNHKDSQFETDIVQRMEQETQRKLEQLRAELDEMYGQQIVQMKQELIRQHMAQMEEMKTRHKGEMENALRSYSNITVNEDQIKLMNVAINELNIKLQDTNSQKEKLKEELGLILEEKCALQRQLEDLVEELSFSREQIQRARQTIAEQESKLNEAHKSLSTVEDLKAEIVSASESRKELELKHEAEVTNYKIKLEMLEKEKNAVLDRMAESQEAELERLRTQLLFSHEEELSKLKEDLEIEHRINIEKLKDNLGIHYKQQIDGLQNEMSQKIETMQFEKDNLITKQNQLILEISKLKDLQQSLVNSKSEEMTLQINELQKEIEILRQEEKEKGTLEQEVQELQLKTELLEKQMKEKENDLQEKFAQLEAENSILKDEKKTLEDMLKIHTPVSQEERLIFLDSIKSKSKDSVWEKEIEILIEENEDLKQQCIQLNEEIEKQRNTFSFAEKNFEVNYQELQEEYACLLKVKDDLEDSKNKQELEYKSKLKALNEELHLQRINPTTVKMKSSVFDEDKTFVAETLEMGEVVEKDTTELMEKLEVTKREKLELSQRLSDLSEQLKQKHGEISFLNEEVKSLKQEKEQVSLRCRELEIIINHNRAENVQSCDTQVSSLLDGVVTMTSRGAEGSVSKVNKSFGEESKIMVEDKVSFENMTVGEESKQEQLILDHLPSVTKESSLRATQPSENDKLQKELNVLKSEQNDLRLQMEAQRICLSLVYSTHVDQVREYMENEKDKALCSLKEELIFAQEEKIKELQKIHQLELQTMKTQETGDEGKPLHLLIGKLQKAVSEECSYFLQTLCSVLGEYYTPALKCEVNAEDKENSGDYISENEDPELQDYRYEVQDFQENMHTLLNKVTEEYNKLLVLQTRLSKIWGQQTDGMKLEFGEENLPKEETEFLSIHSQMTNLEDIDVNHKSKLSSLQDLEKTKLEEQVQELESLISSLQQQLKETEQNYEAEIHCLQKRLQAVSESTVPPSLPVDSVVITESDAQRTMYPGSCVKKNIDGTIEFSGEFGVKEETNIVKLLEKQYQEQLEEEVAKVIVSMSIAFAQQTELSRISGGKENTASSKQAHAVCQQEQHYFNEMKLSQDQIGFQTFETVDVKFKEEFKPLSKELGEHGKEILLSNSDPHDIPESKDCVLTISEEMFSKDKTFIVRQSIHDEISVSSMDASRQLMLNEEQLEDMRQELVRQYQEHQQATELLRQAHMRQMERQREDQEQLQEEIKRLNRQLAQRSSIDNENLVSERERVLLEELEALKQLSLAGREKLCCELRNSSTQTQNGNENQGEVEEQTFKEKELDRKPEDVPPEILSNERYALQKANNRLLKILLEVVKTTAAVEETIGRHVLGILDRSSKSQSSASLIWRSEAEASVKSCVHEEHTRVTDESIPSYSGSDMPRNDINMWSKVTEEGTELSQRLVRSGFAGTEIDPENEELMLNISSRLQAAVEKLLEAISETSSQLEHAKVTQTELMRESFRQKQEATESLKCQEELRERLHEESRAREQLAVELSKAEGVIDGYADEKTLFERQIQEKTDIIDRLEQELLCASNRLQELEAEQQQIQEERELLSRQKEAMKAEAGPVEQQLLQETEKLMKEKLEVQCQAEKVRDDLQKQVKALEIDVEEQVSRFIELEQEKNTELMDLRQQNQALEKQLEKMRKFLDEQAIDREHERDVFQQEIQKLEQQLKVVPRFQPISEHQTREVEQLANHLKEKTDKCSELLLSKEQLQRDIQERNEEIEKLEFRVRELEQALLVSADTFQKVEDRKHFGAVEAKPELSLEVQLQAERDAIDRKEKEITNLEEQLEQFREELENKNEEVQQLHMQLEIQKKESTTRLQELEQENKLFKDDMEKLGLAIKESDAMSTQDQHVLFGKFAQIIQEKEVEIDQLNEQVTKLQQQLKITTDNKVIEEKNELIRDLETQIECLMSDQECVKRNREEEIEQLNEVIEKLQQELANIGQKTSMNAHSLSEEADSLKHQLDVVIAEKLALEQQVETANEEMTFMKNVLKETNFKMNQLTQELFSLKRERESVEKIQSIPENSVNVAIDHLSKDKPELEVVLTEDALKSLENQTYFKSFEENGKGSIINLETRLLQLESTVSAKDLELTQCYKQIKDMQEQGQFETEMLQKKIVNLQKIVEEKVAAALVSQIQLEAVQEYAKFCQDNQTISSEPERTNIQNLNQLREDELGSDISALTLRISELESQVVEMHTSLILEKEQVEIAEKNVLEKEKKLLELQKLLEGNEKKQREKEKKRSPQDVEVLKTTTELFHSNEESGFFNELEALRAESVATKAELASYKEKAEKLQEELLVKETNMTSLQKDLSQVRDHLAEAKEKLSILEKEDETEVQESKKACMFEPLPIKLSKSIASQTDGTLKISSSNQTPQILVKNAGIQINLQSECSSEEVTEIISQFTEKIEKMQELHAAEILDMESRHISETETLKREHYVAVQLLKEECGTLKAVIQCLRSKEVFGFYNMCFSTLCDSGSDWGQGIYLTHSQGFDIASEGRGEESESATDSFPKKIKGLLRAVHNEGMQVLSLTESPYSDGEDHSIQQVSEPWLEERKAYINTISSLKDLITKMQLQREAEVYDSSQSHESFSDWRGELLLALQQVFLEERSVLLAAFRTELTALGTTDAVGLLNCLEQRIQEQGVEYQAAMECLQKADRRSLLSEIQALHAQMNGRKITLKREQESEKPSQELLEYNIQQKQSQMLEMQVELSSMKDRATELQEQLSSEKMVVAELKSELAQTKLELETTLKAQHKHLKELEAFRLEVKDKTDEVHLLNDTLASEQKKSRELQWALEKEKAKLGRSEERDKEELEDLKFSLESQKQRNLQLNLLLEQQKQLLNESQQKIESQRMLYDAQLSEEQGRNLELQVLLESEKVRIREMSSTLDRERELHAQLQSSDGTGQSRPPLPSEDLLKELQKQLEEKHSRIVELLNETEKYKLDSLQTRQQMEKDRQVHRKTLQTEQEANTEGQKKMHELQSKVEDLQRQLEEKRQQVYKLDLEGQRLQGIMQEFQKQELEREEKRESRRILYQNLNEPTTWSLTSDRTRNWVLQQKIEGETKESNYAKLIEMNGGGTGCNHELEMIRQKLQCVASKLQVLPQKASERLQFETADDEDFIWVQENIDEIILQLQKLTGQQGEEPSLVSPSTSCGSLTERLLRQNAELTGHISQLTEEKNDLRNMVMKLEEQIRWYRQTGAGRDNSSRFSLNGGANIEAIIASEKEVWNREKLTLQKSLKRAEAEVYKLKAELRNDSLLQTLSPDSEHVTLKRIYGKYLRAESFRKALIYQKKYLLLLLGGFQECEDATLALLARMGGQPAFTDLEVITNRPKGFTRFRSAVRVSIAISRMKFLVRRWHRVTGSVSININRDGFGLNQGAEKTDSFYHSSGGLELYGEPRHTTYRSRSDLDYIRSPLPFQNRYPGTPADFNPGSLACSQLQNYDPDRALTDYITRLEALQRRLGTIQSGSTTQFHAGMRR

SEQ ID NO: 20 - protein, 3899 aa, Human
  AKAP9
MEDEERQKKLEAGKAKLAQFRQRKAQSDGQSPSKKQKKKRKTSSSKHDVSAHHDLNIDQSQCNEMYINSSQRVESTVIPESTIMRTLHSGEITSHEQGFSVELESEISTTADDCSSEVNGCSFVMRTGKPTNLLREEEFGVDDSYSEQGAQDSPTHLEMMESELAGKQHEIEELNRELEEMRVTYGTEGLQQLQEFEAAIKQRDGIITQLTANLQQARREKDETMREFLELTEQSQKLQIQFQQLQASETLRNSTHSSTAADLLQAKQQILTHQQQLEEQDHLLEDYQKKKEDFTMQISFLQEKIKVYEMEQDKKVENSNKEEIQEKETIIEELNTKIIEEEKKTLELKDKLTTADKLLGELQEQIVQKNQEIKNMKLELTNSKQKERQSSEEIKQLMGTVEELQKRNHKDSQFETDIVQRMEQETQRKLEQLRAELDEMYGQQIVQMKQELIRQHMAQMEEMKTRHKGEMENALRSYSNITVNEDQIKLMNVAINELNIKLQDTNSQKEKLKEELGLILEEKCALQRQLEDLVEELSFSREQIQRARQTIAEQESKLNEAHKSLSTVEDLKAEIVSASESRKELELKHEAEVTNYKIKLEMLEKEKNAVLDRMAESQEAELERLRTQLLFSHEEELSKLKEDLEIEHRINIEKLKDNLGIHYKQQIDGLQNEMSQKIETMQFEKDNLITKQNQLILEISKLKDLQQSLVNSKSEEMTLQINELQKEIEILRQEEKEKGTLEQEVQELQLKTELLEKQMKEKENDLQEKFAQLEAENSILKDEKKTLEDMLKIHTPVSQEERLIFLDSIKSKSKDSVWEKEIEILIEENEDLKQQCIQLNEEIEKQRNTFSFAEKNFEVNYQELQEEYACLLKVKDDLEDSKNKQELEYKSKLKALNEELHLQRINPTTVKMKSSVFDEDKTFVAETLEMGEVVEKDTTELMEKLEVTKREKLELSQRLSDLSEQLKQKHGEISFLNEEVKSLKQEKEQVSLRCRELEIIINHNRAENVQSCDTQVSSLLDGVVTMTSRGAEGSVSKVNKSFGEESKIMVEDKVSFENMTVGEESKQEQLILDHLPSVTKESSLRATQPSENDKLQKELNVLKSEQNDLRLQMEAQRICLSLVYSTHVDQVREYMENEKDKALCSLKEELIFAQEEKIKELQKIHQLELQTMKTQETGDEGKPLHLLIGKLQKAVSEECSYFLQTLCSVLGEYYTPALKCEVNAEDKENSGDYISENEDPELQDYRYEVQDFQENMHTLLNKVTEEYNKLLVLQTRLSKIWGQQTDGMKLEFGEENLPKEETEFLSIHSQMTNLEDIDVNHKSKLSSLQDLEKTKLEEQVQELESLISSLQQQLKETEQNYEAEIHCLQKRLQAVSESTVPPSLPVDSVVITESDAQRTMYPGSCVKKNIDGTIEFSGEFGVKEETNIVKLLEKQYQEQLEEEVAKVIVSMSIAFAQQTELSRISGGKENTASSKQAHAVCQQEQHYFNEMKLSQDQIGFQTFETVDVKFKEEFKPLSKELGEHGKEILLSNSDPHDIPESKDCVLTISEEMFSKDKTFIVRQSIHDEISVSSMDASRQLMLNEEQLEDMRQELVRQYQEHQQATELLRQAHMRQMERQREDQEQLQEEIKRLNRQLAQRSSIDNENLVSERERVLLEELEALKQLSLAGREKLCCELRNSSTQTQNGNENQGEVEEQTFKEKELDRKPEDVPPEILSNERYALQKANNRLLKILLEVVKTTAAVEETIGRHVLGILDRSSKSQSSASLIWRSEAEASVKSCVHEEHTRVTDESIPSYSGSDMPRNDINMWSKVTEEGTELSQRLVRSGFAGTEIDPENEELMLNISSRLQAAVEKLLEAISETSSQLEHAKVTQTELMRESFRQKQEATESLKCQEELRERLHEESRAREQLAVELSKAEGVIDGYADEKTLFERQIQEKTDIIDRLEQELLCASNRLQELEAEQQQIQEERELLSRQKEAMKAEAGPVEQQLLQETEKLMKEKLEVQCQAEKVRDDLQKQVKALEIDVEEQVSRFIELEQEKNTELMDLRQQNQALEKQLEKMRKFLDEQAIDREHERDVFQQEIQKLEQQLKVVPRFQPISEHQTREVEQLANHLKEKTDKCSELLLSKEQLQRDIQERNEEIEKLEFRVRELEQALLVEDRKHFGAVEAKPELSLEVQLQAERDAIDRKEKEITNLEEQLEQFREELENKNEEVQQLHMQLEIQKKESTTRLQELEQENKLFKDDMEKLGLAIKESDAMSTQDQHVLFGKFAQIIQEKEVEIDQLNEQVTKLQQQLKITTDNKVIEEKNELIRDLETQIECLMSDQECVKRNREEEIEQLNEVIEKLQQELANIGQKTSMNAHSLSEEADSLKHQLDVVIAEKLALEQQVETANEEMTFMKNVLKETNFKMNQLTQELFSLKRERESVEKIQSIPENSVNVAIDHLSKDKPELEVVLTEDALKSLENQTYFKSFEENGKGSIINLETRLLQLESTVSAKDLELTQCYKQIKDMQEQGQFETEMLQKKIVNLQKIVEEKVAAALVSQIQLEAVQEYAKFCQDNQTISSEPERTNIQNLNQLREDELGSDISALTLRISELESQVVEMHTSLILEKEQVEIAEKNVLEKEKKLLELQKLLEGNEKKQREKEKKRSPQDVEVLKTTTELFHSNEESGFFNELEALRAESVATKAELASYKEKAEKLQEELLVKETNMTSLQKDLSQVRDHLAEAKEKLSILEKEDETEVQESKKACMFEPLPIKLSKSIASQTDGTLKISSSNQTPQILVKNAGIQINLQSECSSEEVTEIISQFTEKIEKMQELHAAEILDMESRHISETETLKREHYVAVQLLKEECGTLKAVIQCLRSKEGSSIPELAHSDAYQTREICSSDSGSDWGQGIYLTHSQGFDIASEGRGEESESATDSFPKKIKGLLRAVHNEGMQVLSLTESPYSDGEDHSIQQVSEPWLEERKAYINTISSLKDLITKMQLQREAEVYDSSQSHESFSDWRGELLLALQQVFLEERSVLLAAFRTELTALGTTDAVGLLNCLEQRIQEQGVEYQAAMECLQKADRRSLLSEIQALHAQMNGRKITLKREQESEKPSQELLEYNIQQKQSQMLEMQVELSSMKDRATELQEQLSSEKMVVAELKSELAQTKLELETTLKAQHKHLKELEAFRLEVKDKTDEVHLLNDTLASEQKKSRELQWALEKEKAKLGRSEERDKEELEDLKFSLESQKQRNLQLNLLLEQQKQLLNESQQKIESQRMLYDAQLSEEQGRNLELQVLLESEKVRIREMSSTLDRERELHAQLQSSDGTGQSRPPLPSEDLLKELQKQLEEKHSRIVELLNETEKYKLDSLQTRQQMEKDRQVHRKTLQTEQEANTEGQKKMHELQSKVEDLQRQLEEKRQQVYKLDLEGQRLQGIMQEFQKQELEREEKRESRRILYQNLNEPTTWSLTSDRTRNWVLQQKIEGETKESNYAKLIEMNGGGTGCNHELEMIRQKLQCVASKLQVLPQKASERLQFETADDEDFIWVQENIDEIILQLQKLTGQQGEEPSLVSPSTSCGSLTERLLRQNAELTGHISQLTEEKNDLRNMVMKLEEQIRWYRQTGAGRDNSSRFSLNGGANIEAIIASEKEVWNREKLTLQKSLKRAEAEVYKLKAELRNDSLLQTLSPDSEHVTLKRIYGKYLRAESFRKALIYQKKYLLLLLGGFQECEDATLALLARMGGQPAFTDLEVITNRPKGFTRFRSAVRVSIAISRMKFLVRRWHRVTGSVSININRDGFGLNQGAEKTDSFYHSSGGLELYGEPRHTTYRSRSDLDYIRSPLPFQNRYPGTPADFNPGSLACSQLQNYDPDRALTDYITRLEALQRRLGTIQSGSTTQFHAGMRR

SEQ ID NO: 21 - DNA, 12462 bp, Human
  AKAP9
gaagatggcggcggcggcggcggtgacggcgcttcccgtgcggctgaggacgatccgccagtgagcgcggagactgcttccacttcgggcgggggagcgccggaccgaatcggctctctaggccgtggagcttgccgtcccacctccgtccaaatcgacctttcctttctatccccaaccacccctcaacccctgttttcccctgccttccttgcagaggccatggaggacgaggagagacagaagaagctggaggccggcaaagccaagcttgcccagtttcgacaaagaaaagctcagtcggatgggcagagtccttccaagaagcagaaaaaaaagagaaaaacgtcaagcagtaaacatgatgtgtcagcacaccatgatttgaatattgatcaatcacagtgtaatgaaatgtacataaatagttctcagagagtagaatcaactgtgattcctgaatctacaataatgagaactctacatagtggagaaataaccagtcatgagcagggcttctctgtggaactggaaagtgaaatttcaaccacagcagatgactgcagttcagaggtaaatggttgcagttttgtgatgagaacaggaaagcctacaaatttattaagggaagaagaatttggtgttgatgattcttattctgaacaaggagcacaagacagtccgactcatctagagatgatggaaagtgagttggctgggaagcagcatgagattgaagagctaaacagagagctggaagaaatgagggttacctatgggactgaaggactgcagcagttacaagaatttgaagctgccattaaacaaagagatggcattataacccagctcactgctaatttacaacaagcaagaagagaaaaggatgagacaatgagagaatttttagagttgacagaacagagtcaaaaattacagattcaatttcagcaattacaggctagtgaaactctgagaaacagcactcatagtagcacagctgcagacttactacaagccaaacaacagatcctcactcatcaacagcagcttgaagaacaagaccacttattagaagattatcagaaaaagaaagaagacttcacaatgcaaattagtttcttgcaagagaaaattaaagtatatgaaatggaacaagataaaaaagtagaaaactcaaataaagaagaaatacaggaaaaggagacaatcattgaagaattaaacacaaaaataatagaagaagaaaagaaaactcttgagctaaaggataaattaacaactgctgataaattactaggagaattacaagaacagattgtgcaaaagaaccaagaaataaaaaacatgaaattagagctgactaattctaagcaaaaagaaagacagtcttctgaagaaataaaacagttaatggggacagtcgaagaacttcagaagagaaatcataaagacagccagttcgaaactgatatagtacaacgaatggaacaagaaacacaaagaaagttagaacaactccgggcagagctggatgagatgtatgggcagcagatagtgcaaatgaaacaagaattaataagacaacacatggcacagatggaggaaatgaaaacacggcataagggagaaatggagaatgctttaaggtcatattcaaatattacagttaatgaagatcagataaagttaatgaatgtggcaataaatgaactgaatataaaattgcaagatactaactctcaaaaggaaaaactcaaggaagaactaggactaattttagaagaaaagtgtgctctacagagacagcttgaagaccttgttgaagaattgagcttttcaagggaacagattcagagagctagacagacaatagctgaacaagaaagtaaacttaatgaagcacataagtcccttagtacagtggaagatttgaaagctgagattgtttctgcatctgaatccagaaaggaactagaattaaaacatgaagcagaagttacaaattacaagataaaacttgaaatgttagaaaaagaaaagaatgctgtgttagacagaatggctgaatcacaagaagctgaattagagaggctgagaacacagcttctatttagtcacgaagaagagctttccaaactgaaggaagatttagaaattgaacatcgaataaatattgaaaaacttaaagataatttaggcattcactataaacagcagatagatggtttacagaatgaaatgagtcaaaagatagaaaccatgcagtttgaaaaggacaatttgataactaagcagaatcaattaattttggaaatttcaaagctaaaagatttacagcagtctcttgtaaattcaaagtcagaagaaatgactcttcaaatcaatgaacttcaaaaagaaattgaaatactcagacaagaagaaaaagaaaagggtacacttgaacaagaagttcaagaattacaacttaaaacagaattgttagaaaaacagatgaaggaaaaagagaatgatcttcaagaaaaatttgcacaacttgaagcagagaatagcattcttaaagatgaaaagaaaacccttgaagacatgttgaaaatacatactcctgttagccaagaagaaagattgattttcttagactccattaagtccaaatccaaagactctgtgtgggaaaaagaaatagaaatacttatagaggaaaatgaggacctcaaacaacaatgtattcagctaaatgaagagattgaaaagcaaaggaacactttttcatttgctgaaaaaaactttgaagttaactatcaagagttacaagaggagtatgcttgccttctcaaagtaaaagatgatttagaagacagtaaaaataaacaggaattagagtataaaagtaaacttaaagcacttaatgaagagcttcatttgcaaagaataaatccaactacagtgaaaatgaaaagttctgtctttgatgaagacaaaacttttgtagcagaaacattggaaatgggtgaggttgttgaaaaggatacaacagaactcatggaaaaacttgaggtaaccaagcgagagaaattagagctgtcacagagactgtctgatctttctgaacaattgaaacagaaacatggtgagattagttttctaaatgaagaagttaaatctttaaagcaagagaaagaacaagtttcattgagatgtagagagctagaaatcattattaaccacaacagggcagaaaatgtacagtcatgtgatactcaagtaagctctttattagatggagttgtgaccatgacaagcaggggtgctgaaggatcagtttctaaagtaaataaaagttttggtgaagaatcaaaaataatggtggaagataaagtttcttttgaaaatatgactgttggagaagaaagtaagcaagaacagttgattttggatcacttaccatctgtaacaaaggaatcatcacttagagcaactcaaccaagtgaaaatgataaacttcagaaagaactcaatgtacttaaatcagaacagaatgatttaaggctacagatggaagcccaacgcatttgcctctctctggtttattcaactcatgtggatcaggttcgtgaatatatggaaaatgaaaaagataaagctctttgcagtcttaaagaagagcttatttttgctcaagaggaaaagatcaaggaacttcagaaaatacaccagttagaactacagactatgaaaacacaagaaacaggtgatgaaggaaagcctttacatctgctcattggaaaacttcaaaaggcagtgtctgaagaatgttcttattttttacagactttatgcagtgtccttggtgaatattatactcctgctttaaaatgtgaagtaaatgcagaagacaaagagaattctggtgattacatttctgaaaatgaagatccagaattacaagattatagatatgaagttcaagactttcaagaaaatatgcacactcttctcaacaaagtaacagaagaatacaacaaactcttggtacttcaaacacgactaagcaagatctggggacagcagacagatggtatgaaacttgaatttggagaagaaaaccttccaaaagaggaaacagagtttttatcaatccattctcagatgaccaatttggaagacattgatgtcaatcataaaagcaagttatcttctctgcaagatcttgaaaaaactaaacttgaagaacaagttcaagaattagaaagcctcatatcctctttgcagcaacagttgaaagaaactgaacaaaactatgaggcagagatccactgtttacagaagaggcttcaagctgttagtgagtccacggttccgccaagcttacctgttgattcggtggtaattacagaatctgatgcacagagaacaatgtaccctggaagttgtgtgaaaaagaatattgatggtacaatagagttttctggtgaatttggagtgaaagaggaaacaaatatcgttaagttgcttgaaaaacaataccaagaacaattagaagaagaagtagctaaggttattgtgtcaatgagtatagcatttgctcaacaaactgaactgtctagaatatctgggggaaaagaaaatactgcatcatcaaagcaagcacatgctgtgtgtcagcaagaacaacattattttaatgaaatgaaattatcacaggatcaaattggttttcagacttttgagacagtggatgtgaaatttaaagaagaatttaaaccacttagtaaagagttaggagaacatggaaaggaaattttattatcaaatagtgatccccatgatataccagaatcaaaggactgtgtgctgactatttcagaagaaatgttctccaaagataaaacatttatagttagacagtctattcatgatgagatttcagtgtcaagcatggatgcttctagacaactaatgttgaatgaagaacagttggaagatatgagacaggaacttgtacgacaataccaagaacatcaacaggcaacggaattgttaaggcaagcacatatgcggcaaatggagagacagcgagaagaccaggaacagctacaagaagagattaagagacttaatagacaattagcccagagatcctccatagataatgaaaacctggtttcagagagagagagggtgcttttagaggagctggaagcactaaagcagctgtctttagctggaagagagaagctgtgttgtgagctgcgcaacagcagtacgcaaacacagaatggaaatgaaaaccaaggagaagttgaagaacaaacatttaaagaaaaggaattagacagaaaacctgaagatgtgcctcctgagattttgtctaatgaaaggtatgcactccagaaagctaataatagacttttgaagatcctcttagaagttgtaaagacaacagcagctgttgaagaaacaattggtcgccatgtccttgggattctagatagatctagtaaaagccagtcatctgccagcctaatttggaggtcagaagcagaggcatctgtaaagtcatgtgtccatgaggaacatacaagagttacagatgaatccattccctcttattctggaagtgatatgccaagaaatgacattaacatgtggtcaaaagtaactgaggaaggaacagagctgtcacaacgacttgtgaggagtggttttgctggaactgaaatagaccctgaaaatgaagaacttatgctgaacattagctctcgactacaagcagcagttgaaaaactcctagaagccataagtgaaactagcagtcagcttgaacatgcgaaagtgacacagacagagttgatgcgtgagtcatttagacagaaacaagaagcaacagagtcccttaagtgccaagaggaacttcgagagcgccttcatgaggagtccagggccagagaacagctagctgtggagctcagtaaggctgagggcgtcattgatggctatgcagatgaaaaaactctttttgaaaggcaaattcaggaaaaaactgatataatagatcgtcttgagcaggagttgttatgtgcaagtaacaggttgcaagaattggaggcagagcaacagcagatccaagaagaaagagaattactgtccagacaaaaggaagctatgaaagcagaggcaggcccagttgaacaacaattactacaggagacagaaaaattaatgaaggaaaaactagaagtacaatgtcaagctgaaaaagtacgtgatgaccttcaaaaacaagtgaaagctctagaaatagatgtggaagaacaagtcagtaggtttatagagctggaacaagaaaaaaatactgaactaatggatttaagacagcaaaaccaagcattggaaaagcagttagaaaaaatgagaaaatttttagatgagcaagccattgacagagaacatgagagagatgtattccaacaggaaatacagaaactagaacagcaacttaaggttgttcctcgattccagcctatcagtgaacatcaaactagagaggttgaacagttagcaaatcatctgaaagaaaaaacagacaaatgcagtgagcttttgctctctaaagagcagcttcaaagggatatacaagaaaggaatgaagaaatagagaaactggagttcagagtaagagaactggagcaggcgcttcttgtgagtgcagatacttttcaaaaggtagaggaccgaaaacactttggagctgtagaagctaaaccagaattgtccctagaagtacaattgcaggctgaacgagatgccatagacagaaaggaaaaagagattacaaacttagaagagcaattagaacagtttagagaagaactggaaaataagaatgaagaagttcaacaattacatatgcaattagaaatacagaaaaaggaatctactacccgcctacaagaacttgaacaggaaaacaaattatttaaggatgacatggagaaactgggacttgccataaaggaatctgatgccatgtctactcaagaccaacatgtgctatttgggaaatttgctcaaataatacaggaaaaagaggtagaaattgaccaattaaatgaacaagttacgaaactccagcagcaacttaaaattacaacagataacaaggttattgaagaaaaaaatgaactgataagggatcttgaaacccaaatagaatgtttgatgagtgatcaagaatgtgtgaagagaaatagagaagaagaaatagagcagctcaatgaagtgattgaaaaacttcaacaggaattggcaaatattggacagaagacatcaatgaatgctcattccctctcagaagaagcagacagtttaaaacatcaattggatgtggttatagctgaaaagctggccttggaacagcaagtagaaaccgctaatgaagaaatgaccttcatgaaaaatgtacttaaagaaaccaattttaaaatgaatcagctaacacaggaattattcagcttaaagagagaacgtgaaagtgtggaaaagattcaaagcataccagagaatagtgttaacgtggctatagatcatctgagcaaagacaaacctgaactagaagtagtccttacagaggatgctcttaaatccctagaaaatcagacatacttcaaatcttttgaagaaaatggcaaaggttccataattaatttggaaacaaggttgctacaacttgagagcactgttagtgcaaaggacttagaacttacccagtgttataaacaaataaaagacatgcaagaacaaggccagtttgaaacagaaatgcttcaaaagaagattgtaaacctacagaaaatagttgaagaaaaagtggctgctgctcttgtcagtcaaatccaacttgaggcagttcaggaatatgcaaaattctgtcaagataatcaaacaatttcatcagaacctgaaagaacaaatattcagaatttaaatcaactaagagaagatgagttggggtcagatatatcagcattaaccttgagaatatcagaattagaaagccaggttgttgaaatgcatactagtttgattttagaaaaagaacaagtagaaattgcagaaaaaaatgttttagaaaaagaaaagaagctgctagaactacagaagctattggagggcaatgagaaaaaacagagagagaaagaaaagaaaagaagccctcaagatgttgaagttctcaagacaactactgagctatttcatagcaatgaagaaagtggattttttaatgaactcgaggctcttagagctgaatcagtggctaccaaagcagaacttgccagttataaagaaaaggctgaaaaacttcaagaagagcttttggtaaaagaaacaaatatgacatctcttcagaaagacttaagccaagttagggatcacctcgcagaggcaaaagagaaattgtccattttagaaaaagaagatgagactgaggtacaagaaagcaaaaaggcctgcatgtttgagccacttcctataaaactgagtaagagcattgcatcccagacagatgggactctgaagatcagtagcagcaatcagactccacaaattcttgttaaaaatgcaggaatacaaattaatttacagagtgaatgttcctcagaagaagttactgaaataatcagtcagtttactgaaaaaattgagaagatgcaagaactacatgctgctgaaattttggacatggaatccagacatatttcagaaactgaaaccttaaagagggaacactatgttgccgttcagttactgaaagaggaatgtggtaccttgaaggcagtgatacagtgtctgagaagtaaagagggatcctcaattcctgagctagcacattctgatgcttaccagactagagaaatatgctccagtgattctggatcagactggggtcagggaatttatcttacacacagtcagggatttgacatagcatcagaaggccgaggagaagaaagtgaaagtgcaacagattcctttccaaagaaaataaagggattactgagagctgtccataatgaaggcatgcaggtgctttctctcactgagtctccctatagtgatggagaggaccattctattcagcaggtttcagaaccttggctagaagagagaaaagcttacatcaatacaatctcatctctaaaggatttaattacaaagatgcaactgcaaagagaagccgaggtttatgatagttctcaatctcatgagagcttctcagactggcgaggtgaactactgcttgcccttcaacaagttttcttagaagagcgtagtgttttactagcagcatttcggacggagctgacagctctaggtactacagatgcagttggtttactaaactgtttggaacagagaatacaagaacagggtgttgaatatcaagcagctatggaatgcctccagaaagcagatagaaggagtttgttatctgaaattcaggcactgcatgcacaaatgaatggtaggaaaattactctgaaaagagaacaagagagtgagaaaccaagccaagaactcttggaatataatatacagcagaagcagtctcaaatgctggagatgcaagtggagctcagcagtatgaaagacagagcaacggaactgcaggagcagctgagttctgagaaaatggtggttgctgaactgaagagtgagcttgcacaaactaaattggaactagaaacaacactcaaggcacagcataaacacctaaaagaattggaggctttcaggttggaagttaaagataagacagatgaagtacatttgcttaatgacacattagcaagtgaacagaaaaaatcaagagagctccagtgggctttggagaaagagaaagccaagttgggacgcagtgaagaacgggataaagaagaacttgaggatctgaagttttcacttgagagtcagaaacaaaggaatcttcagctaaatctacttttggaacaacagaaacaactactgaacgaatcccagcaaaaaatagaatcacagagaatgctatatgatgcccagttgtcagaagaacaaggtcgaaacttagagcttcaggtacttcttgaatctgagaaagttcgaattcgggaaatgagtagtaccctagatagggagcgggaattgcacgcacagctgcagagcagtgatggtactggacagtctcggccacccttgccctcagaggacctactgaaagagctgcagaaacagctagaggaaaaacacagtcgcatagtagaattgttaaatgagactgaaaaatataaactggattctttgcaaacacgacagcaaatggaaaaagataggcaggttcacaggaaaacactgcagacagaacaggaggccaacactgagggacagaaaaaaatgcatgagctccagtccaaagtggaagatcttcagcgccagctggaagagaaaagacaacaagtttataagttagaccttgaaggacagcgactacaaggaatcatgcaggaattccagaagcaagaactagaacgagaagaaaaacgagaaagtagaagaattctgtatcagaaccttaatgagccaaccacgtggagcttaaccagtgatagaactagaaattgggttcttcaacagaaaatagaaggagaaacaaaagaatcaaactacgctaaattgattgaaatgaatggaggaggaaccggctgtaatcatgaattagaaatgatcagacaaaagcttcaatgtgtagcttcaaaactacaggttctaccccagaaagcctctgagagactacagtttgaaacagcagatgatgaagatttcatttgggttcaggaaaatattgatgaaattattttacaactacagaaattaactggccagcaaggtgaagagcccagcttggtgtccccaagtacttcttgtggctcattgactgaaagactactgagacaaaatgctgagctgacagggcatatcagtcaactgactgaagagaagaatgacttaaggaacatggttatgaagctggaagagcagatcaggtggtatcgacagacaggagctggtagagataattcttccaggttttcattgaatggtggtgccaacattgaagccatcattgcctctgaaaaagaagtatggaacagagaaaaattgactctccagaaatctttgaaaagggcagaggctgaagtatacaaactgaaagctgaactaagaaatgactctttacttcaaactctgagccctgattctgaacatgtcactttaaagagaatttatggtaaatacttgagggcagaaagttttcgaaaggctctcatttaccagaagaaatacctgctgctgttactgggtgggttccaggaatgtgaagatgccaccttggccctgcttgcccggatgggggggcagccagctttcacggatctagaggtgatcaccaatcgcccaaagggcttcaccaggtttcggtcggccgtcagagtatccattgcaatttccagaatgaaatttttggttcgacggtggcatcgagtcacaggttctgtttccatcaatattaacagagatggctttggactgaatcaaggtgcagaaaagactgactcattttatcattcttctggtgggctggagttatatggagaaccaagacatactacgtatcgctcaagatcagatctggactatattaggtcccctttaccatttcagaataggtacccaggcactccagctgatttcaatcctggttctttagcatgttctcagcttcagaattacgatcctgacagagccctaacagattatatcactcggctagaggcactgcaaagacgacttggaactatacagtcaggttcaactactcaatttcatgctggcatgagaagataatcctttgaaacatcattaattgaagtgattttaaatagatttccttttgtaaatcaatggttcttttgtgcttttgtattgtgaatattcaatgggaccaatatgaacacagcttatgattgtatacaaatcccttgccagcacatgaaaacaaactggaatttgtatatataagcattgtgtatgtattcatgcacaataattattgaattacctgtatatttgtggaatgctaatttaaaacattaaattataaaccttgtgtatttatcaaatgggtgaaaagattaaacttttacgcattacaatactgctgaatgtgtagctcgaggtgtcctgcacttttcttataaggctactgaagttacatgttttgcctaatatattctactggtgatgaagacagataatatcacttgtagagacctatttttgtataatggtagaagttttgaattttatggggtattttgtcaagtactgaaataaaaatgacttcaccattttcaccacact

SEQ ID NO: 22 - DNA, 6058 bp, Human
  AKAP9
gaagatggcggcggcggcggcggtgacggcgcttcccgtgcggctgaggacgatccgccagtgagcgcggagactgcttccacttcgggcgggggagcgccggaccgaatcggctctctaggccgtggagcttgccgtcccacctccgtccaaatcgacctttcctttctatccccaaccacccctcaacccctgttttcccctgccttccttgcagaggccatggaggacgaggagagacagaagaagctggaggccggcaaagccaagattgaagaactctctttagcttttcttgtcagacagcttgcccagtttcgacaaagaaaagctcagtcggatgggcagagtccttccaagaagcagaaaaaaaagagaaaaacgtcaagcagtaaacatgatgtgtcagcacaccatgatttgaatattgatcaatcacagtgtaatgaaatgtacataaatagttctcagagagtagaatcaactgtgattcctgaatctacaataatgagaactctacatagtggagaaataaccagtcatgagcagggcttctctgtggaactggaaagtgaaatttcaaccacagcagatgactgcagttcagaggtaaatggttgcagttttgtgatgagaacaggaaagcctacaaatttattaagggaagaagaatttggtgttgatgattcttattctgaacaaggagcacaagacagtccgactcatctagagatgatggaaagtgagttggctgggaagcagcatgagattgaagagctaaacagagagctggaagaaatgagggttacctatgggactgaaggactgcagcagttacaagaatttgaagctgccattaaacaaagagatggcattataacccagctcactgctaatttacaacaagcaagaagagaaaaggatgagacaatgagagaatttttagagttgacagaacagagtcaaaaattacagattcaatttcagcaattacaggctagtgaaactctgagaaacagcactcatagtagcacagctgcagacttactacaagccaaacaacagatcctcactcatcaacagcagcttgaagaacaagaccacttattagaagattatcagaaaaagaaagaagacttcacaatgcaaattagtttcttgcaagagaaaattaaagtatatgaaatggaacaagataaaaaagtagaaaactcaaataaagaagaaatacaggaaaaggagacaatcattgaagaattaaacacaaaaataatagaagaagaaaagaaaactcttgagctaaaggataaattaacaactgctgataaattactaggagaattacaagaacagattgtgcaaaagaaccaagaaataaaaaacatgaaattagagctgactaattctaagcaaaaagaaagacagtcttctgaagaaataaaacagttaatggggacagtcgaagaacttcagaagagaaatcataaagacagccagttcgaaactgatatagtacaacgaatggaacaagaaacacaaagaaagttagaacaactccgggcagagctggatgagatgtatgggcagcagatagtgcaaatgaaacaagaattaataagacaacacatggcacagatggaggaaatgaaaacacggcataagggagaaatggagaatgctttaaggtcatattcaaatattacagttaatgaagatcagataaagttaatgaatgtggcaataaatgaactgaatataaaattgcaagatactaactctcaaaaggaaaaactcaaggaagaactaggactaattttagaagaaaagtgtgctctacagagacagcttgaagaccttgttgaagaattgagcttttcaagggaacagattcagagagctagacagacaatagctgaacaagaaagtaaacttaatgaagcacataagtcccttagtacagtggaagatttgaaagctgagattgtttctgcatctgaatccagaaaggaactagaattaaaacatgaagcagaagttacaaattacaagataaaacttgaaatgttagaaaaagaaaagaatgctgtgttagacagaatggctgaatcacaagaagctgaattagagaggctgagaacacagcttctatttagtcacgaagaagagctttccaaactgaaggaagatttagaaattgaacatcgaataaatattgaaaaacttaaagataatttaggcattcactataaacagcagatagatggtttacagaatgaaatgagtcaaaagatagaaaccatgcagtttgaaaaggacaatttgataactaagcagaatcaattaattttggaaatttcaaagctaaaagatttacagcagtctcttgtaaattcaaagtcagaagaaatgactcttcaaatcaatgaacttcaaaaagaaattgaaatactcagacaagaagaaaaagaaaagggtacacttgaacaagaagttcaagaattacaacttaaaacagaattgttagaaaaacagatgaaggaaaaagagaatgatcttcaagaaaaatttgcacaacttgaagcagagaatagcattcttaaagatgaaaagaaaacccttgaagacatgttgaaaatacatactcctgttagccaagaagaaagattgattttcttagactccattaagtccaaatccaaagactctgtgtgggaaaaagaaatagaaatacttatagaggaaaatgaggacctcaaacaacaatgtattcagctaaatgaagagattgaaaagcaaaggaacactttttcatttgctgaaaaaaactttgaagttaactatcaagagttacaagaggagtatgcttgccttctcaaagtaaaagatgatttagaagacagtaaaaataaacaggaattagagtataaaagtaaacttaaagcacttaatgaagagcttcatttgcaaagaataaatccaactacagtgaaaatgaaaagttctgtctttgatgaagacaaaacttttgtagcagaaacattggaaatgggtgaggttgttgaaaaggatacaacagaactcatggaaaaacttgaggtaaccaagcgagagaaattagagctgtcacagagactgtctgatctttctgaacaattgaaacagaaacatggtgagattagttttctaaatgaagaagttaaatctttaaagcaagagaaagaacaagtttcattgagatgtagagagctagaaatcattattaaccacaacagggcagaaaatgtacagtcatgtgatactcaagtaagctctttattagatggagttgtgaccatgacaagcaggggtgctgaaggatcagtttctaaagtaaataaaagttttggtgaagaatcaaaaataatggtggaagataaagtttcttttgaaaatatgactgttggagaagaaagtaagcaagaacagttgattttggatcacttaccatctgtaacaaaggaatcatcacttagagcaactcaaccaagtgaaaatgataaacttcagaaagaactcaatgtacttaaatcagaacagaatgatttaaggctacagatggaagcccaacgcatttgcctctctctggtttattcaactcatgtggatcaggttcgtgaatatatggaaaatgaaaaagataaagctctttgcagtcttaaagaagagcttatttttgctcaagaggaaaagatcaaggaacttcagaaaatacaccagttagaactacagactatgaaaacacaagaaacaggtgatgaaggaaagcctttacatctgctcattggaaaacttcaaaaggcagtgtctgaagaatgttcttattttttacagactttatgcagtgtccttggtgaatattatactcctgctttaaaatgtgaagtaaatgcagaagacaaagagaattctggtgattacatttctgaaaatgaagatccagaattacaagattatagatatgaagttcaagactttcaagaaaatatgcacactcttctcaacaaagtaacagaagaatacaacaaactcttggtacttcaaacacgactaagcaagatctggggacagcagacagatggtatgaaacttgaatttggagaagaaaaccttccaaaagaggaaacagagtttttatcaatccattctcagatgaccaatttggaagacattgatgtcaatcataaaagcaagttatcttctctgcaagatcttgaaaaaactaaacttgaagaacaagttcaagaattagaaagcctcatatcctctttgcagcaacagttgaaagaaactgaacaaaactatgaggcagagatccactgtttacagaagaggcttcaagctgttagtgagtccacggttccgccaagcttacctgttgattcggtggtaattacagaatctgatgcacagagaacaatgtaccctggaagttgtgtgaaaaagaatattgatggtacaatagagttttctggtgaatttggagtgaaagaggaaacaaatatcgttaagttgcttgaaaaacaataccaagaacaattagaagaagaagtagctaaggttattgtgtcaatgagtatagcatttgctcaacaaactgaactgtctagaatatctgggggaaaagaaaatactgcatcatcaaagcaagcacatgctgtgtgtcagcaagaacaacattattttaatgaaatgaaattatcacaggatcaaattggttttcagacttttgagacagtggatgtgaaatttaaagaagaatttaaaccacttagtaaagagttaggagaacatggaaaggaaattttattatcaaatagtgatccccatgatataccagaatcaaaggactgtgtgctgactatttcagaagaaatgttctccaaagataaaacatttatagttagacagtctattcatgatgagatttcagtgtcaagcatggatgcttctagacaactaatgttgaatgaagaacagttggaagatatgagacaggaacttgtacgacaataccaagaacatcaacaggcaacggaattgttaaggcaagcacatatgcggcaaatggagagacagcgagaagaccaggaacagctacaagaagagattaagagacttaatagacaattagcccaggtaagggtcttgtagtcccctttctctccccagttatttttttttccaaacaccaacttgaaccagatccccaattaaaacaacagtattttttatgtagccataatttttttttttttttgccgaaatctgaataaactacatatatttagcatcaggaacacactctatactaagacagcagctttagatcttgttagggacacctatctcaaccttggagtgggcattgtctttctgtcattttatttaactcctttttcaagcactggaaaagtggctacacggttttgtttttttcttttaaatcattccattagccatatatagcaaactcactttgacattttggaaataacattgtgctgaggtgctccattatgcagttactatcattcagttttactatcttcatttatagttttgtgagtccaccaattagcatctcgaaggtttacctttatctgtctttaatccatctttttaatcatgaatggaaatcggaagtagtatgcttctgaaactctttccagggaaacatctcttcttgatttgagaaatgcaaatttatttaacattcttatccctttcttgactaaatttaaatacttcttggtatttgggagctggattcttgtcaactgctgtataaaatatactcacaaaaccattgcagaaaagcaagaaatatttatgtagaagttcttatgaaaacttattgaatttaattttgaaaactgaagctaagagagataataaatatctagagataactattaacagtattctttcaaacataaaataataagataattgggagctgagcataaaacattatttggaaaaattaactttgcttttcttcattgcattttgtgaattc

SEQ ID NO: 23 - DNA, 12474 bp, Human
  AKAP9
gaagatggcggcggcggcggcggtgacggcgcttcccgtgcggctgaggacgatccgccagtgagcgcggagactgcttccacttcgggcgggggagcgccggaccgaatcggctctctaggccgtggagcttgccgtcccacctccgtccaaatcgacctttcctttctatccccaaccacccctcaacccctgttttcccctgccttccttgcagaggccatggaggacgaggagagacagaagaagctggaggccggcaaagccaagattgaagaactctctttagcttttcttgtcagacagcttgcccagtttcgacaaagaaaagctcagtcggatgggcagagtccttccaagaagcagaaaaaaaagagaaaaacgtcaagcagtaaacatgatgtgtcagcacaccatgatttgaatattgatcaatcacagtgtaatgaaatgtacataaatagttctcagagagtagaatcaactgtgattcctgaatctacaataatgagaactctacatagtggagaaataaccagtcatgagcagggcttctctgtggaactggaaagtgaaatttcaaccacagcagatgactgcagttcagaggtaaatggttgcagttttgtgatgagaacaggaaagcctacaaatttattaagggaagaagaatttggtgttgatgattcttattctgaacaaggagcacaagacagtccgactcatctagagatgatggaaagtgagttggctgggaagcagcatgagattgaagagctaaacagagagctggaagaaatgagggttacctatgggactgaaggactgcagcagttacaagaatttgaagctgccattaaacaaagagatggcattataacccagctcactgctaatttacaacaagcaagaagagaaaaggatgagacaatgagagaatttttagagttgacagaacagagtcaaaaattacagattcaatttcagcaattacaggctagtgaaactctgagaaacagcactcatagtagcacagctgcagacttactacaagccaaacaacagatcctcactcatcaacagcagcttgaagaacaagaccacttattagaagattatcagaaaaagaaagaagacttcacaatgcaaattagtttcttgcaagagaaaattaaagtatatgaaatggaacaagataaaaaagtagaaaactcaaataaagaagaaatacaggaaaaggagacaatcattgaagaattaaacacaaaaataatagaagaagaaaagaaaactcttgagctaaaggataaattaacaactgctgataaattactaggagaattacaagaacagattgtgcaaaagaaccaagaaataaaaaacatgaaattagagctgactaattctaagcaaaaagaaagacagtcttctgaagaaataaaacagttaatggggacagtcgaagaacttcagaagagaaatcataaagacagccagttcgaaactgatatagtacaacgaatggaacaagaaacacaaagaaagttagaacaactccgggcagagctggatgagatgtatgggcagcagatagtgcaaatgaaacaagaattaataagacaacacatggcacagatggaggaaatgaaaacacggcataagggagaaatggagaatgctttaaggtcatattcaaatattacagttaatgaagatcagataaagttaatgaatgtggcaataaatgaactgaatataaaattgcaagatactaactctcaaaaggaaaaactcaaggaagaactaggactaattttagaagaaaagtgtgctctacagagacagcttgaagaccttgttgaagaattgagcttttcaagggaacagattcagagagctagacagacaatagctgaacaagaaagtaaacttaatgaagcacataagtcccttagtacagtggaagatttgaaagctgagattgtttctgcatctgaatccagaaaggaactagaattaaaacatgaagcagaagttacaaattacaagataaaacttgaaatgttagaaaaagaaaagaatgctgtgttagacagaatggctgaatcacaagaagctgaattagagaggctgagaacacagcttctatttagtcacgaagaagagctttccaaactgaaggaagatttagaaattgaacatcgaataaatattgaaaaacttaaagataatttaggcattcactataaacagcagatagatggtttacagaatgaaatgagtcaaaagatagaaaccatgcagtttgaaaaggacaatttgataactaagcagaatcaattaattttggaaatttcaaagctaaaagatttacagcagtctcttgtaaattcaaagtcagaagaaatgactcttcaaatcaatgaacttcaaaaagaaattgaaatactcagacaagaagaaaaagaaaagggtacacttgaacaagaagttcaagaattacaacttaaaacagaattgttagaaaaacagatgaaggaaaaagagaatgatcttcaagaaaaatttgcacaacttgaagcagagaatagcattcttaaagatgaaaagaaaacccttgaagacatgttgaaaatacatactcctgttagccaagaagaaagattgattttcttagactccattaagtccaaatccaaagactctgtgtgggaaaaagaaatagaaatacttatagaggaaaatgaggacctcaaacaacaatgtattcagctaaatgaagagattgaaaagcaaaggaacactttttcatttgctgaaaaaaactttgaagttaactatcaagagttacaagaggagtatgcttgccttctcaaagtaaaagatgatttagaagacagtaaaaataaacaggaattagagtataaaagtaaacttaaagcacttaatgaagagcttcatttgcaaagaataaatccaactacagtgaaaatgaaaagttctgtctttgatgaagacaaaacttttgtagcagaaacattggaaatgggtgaggttgttgaaaaggatacaacagaactcatggaaaaacttgaggtaaccaagcgagagaaattagagctgtcacagagactgtctgatctttctgaacaattgaaacagaaacatggtgagattagttttctaaatgaagaagttaaatctttaaagcaagagaaagaacaagtttcattgagatgtagagagctagaaatcattattaaccacaacagggcagaaaatgtacagtcatgtgatactcaagtaagctctttattagatggagttgtgaccatgacaagcaggggtgctgaaggatcagtttctaaagtaaataaaagttttggtgaagaatcaaaaataatggtggaagataaagtttcttttgaaaatatgactgttggagaagaaagtaagcaagaacagttgattttggatcacttaccatctgtaacaaaggaatcatcacttagagcaactcaaccaagtgaaaatgataaacttcagaaagaactcaatgtacttaaatcagaacagaatgatttaaggctacagatggaagcccaacgcatttgcctctctctggtttattcaactcatgtggatcaggttcgtgaatatatggaaaatgaaaaagataaagctctttgcagtcttaaagaagagcttatttttgctcaagaggaaaagatcaaggaacttcagaaaatacaccagttagaactacagactatgaaaacacaagaaacaggtgatgaaggaaagcctttacatctgctcattggaaaacttcaaaaggcagtgtctgaagaatgttcttattttttacagactttatgcagtgtccttggtgaatattatactcctgctttaaaatgtgaagtaaatgcagaagacaaagagaattctggtgattacatttctgaaaatgaagatccagaattacaagattatagatatgaagttcaagactttcaagaaaatatgcacactcttctcaacaaagtaacagaagaatacaacaaactcttggtacttcaaacacgactaagcaagatctggggacagcagacagatggtatgaaacttgaatttggagaagaaaaccttccaaaagaggaaacagagtttttatcaatccattctcagatgaccaatttggaagacattgatgtcaatcataaaagcaagttatcttctctgcaagatcttgaaaaaactaaacttgaagaacaagttcaagaattagaaagcctcatatcctctttgcagcaacagttgaaagaaactgaacaaaactatgaggcagagatccactgtttacagaagaggcttcaagctgttagtgagtccacggttccgccaagcttacctgttgattcggtggtaattacagaatctgatgcacagagaacaatgtaccctggaagttgtgtgaaaaagaatattgatggtacaatagagttttctggtgaatttggagtgaaagaggaaacaaatatcgttaagttgcttgaaaaacaataccaagaacaattagaagaagaagtagctaaggttattgtgtcaatgagtatagcatttgctcaacaaactgaactgtctagaatatctgggggaaaagaaaatactgcatcatcaaagcaagcacatgctgtgtgtcagcaagaacaacattattttaatgaaatgaaattatcacaggatcaaattggttttcagacttttgagacagtggatgtgaaatttaaagaagaatttaaaccacttagtaaagagttaggagaacatggaaaggaaattttattatcaaatagtgatccccatgatataccagaatcaaaggactgtgtgctgactatttcagaagaaatgttctccaaagataaaacatttatagttagacagtctattcatgatgagatttcagtgtcaagcatggatgcttctagacaactaatgttgaatgaagaacagttggaagatatgagacaggaacttgtacgacaataccaagaacatcaacaggcaacggaattgttaaggcaagcacatatgcggcaaatggagagacagcgagaagaccaggaacagctacaagaagagattaagagacttaatagacaattagcccagagatcctccatagataatgaaaacctggtttcagagagagagagggtgcttttagaggagctggaagcactaaagcagctgtctttagctggaagagagaagctgtgttgtgagctgcgcaacagcagtacgcaaacacagaatggaaatgaaaaccaaggagaagttgaagaacaaacatttaaagaaaaggaattagacagaaaacctgaagatgtgcctcctgagattttgtctaatgaaaggtatgcactccagaaagctaataatagacttttgaagatcctcttagaagttgtaaagacaacagcagctgttgaagaaacaattggtcgccatgtccttgggattctagatagatctagtaaaagccagtcatctgccagcctaatttggaggtcagaagcagaggcatctgtaaagtcatgtgtccatgaggaacatacaagagttacagatgaatccattccctcttattctggaagtgatatgccaagaaatgacattaacatgtggtcaaaagtaactgaggaaggaacagagctgtcacaacgacttgtgaggagtggttttgctggaactgaaatagaccctgaaaatgaagaacttatgctgaacattagctctcgactacaagcagcagttgaaaaactcctagaagccataagtgaaactagcagtcagcttgaacatgcgaaagtgacacagacagagttgatgcgtgagtcatttagacagaaacaagaagcaacagagtcccttaagtgccaagaggaacttcgagagcgccttcatgaggagtccagggccagagaacagctagctgtggagctcagtaaggctgagggcgtcattgatggctatgcagatgaaaaaactctttttgaaaggcaaattcaggaaaaaactgatataatagatcgtcttgagcaggagttgttatgtgcaagtaacaggttgcaagaattggaggcagagcaacagcagatccaagaagaaagagaattactgtccagacaaaaggaagctatgaaagcagaggcaggcccagttgaacaacaattactacaggagacagaaaaattaatgaaggaaaaactagaagtacaatgtcaagctgaaaaagtacgtgatgaccttcaaaaacaagtgaaagctctagaaatagatgtggaagaacaagtcagtaggtttatagagctggaacaagaaaaaaatactgaactaatggatttaagacagcaaaaccaagcattggaaaagcagttagaaaaaatgagaaaatttttagatgagcaagccattgacagagaacatgagagagatgtattccaacaggaaatacagaaactagaacagcaacttaaggttgttcctcgattccagcctatcagtgaacatcaaactagagaggttgaacagttagcaaatcatctgaaagaaaaaacagacaaatgcagtgagcttttgctctctaaagagcagcttcaaagggatatacaagaaaggaatgaagaaatagagaaactggagttcagagtaagagaactggagcaggcgcttcttgtgagtgcagatacttttcaaaaggtagaggaccgaaaacactttggagctgtagaagctaaaccagaattgtccctagaagtacaattgcaggctgaacgagatgccatagacagaaaggaaaaagagattacaaacttagaagagcaattagaacagtttagagaagaactggaaaataagaatgaagaagttcaacaattacatatgcaattagaaatacagaaaaaggaatctactacccgcctacaagaacttgaacaggaaaacaaattatttaaggatgacatggagaaactgggacttgccataaaggaatctgatgccatgtctactcaagaccaacatgtgctatttgggaaatttgctcaaataatacaggaaaaagaggtagaaattgaccaattaaatgaacaagttacgaaactccagcagcaacttaaaattacaacagataacaaggttattgaagaaaaaaatgaactgataagggatcttgaaacccaaatagaatgtttgatgagtgatcaagaatgtgtgaagagaaatagagaagaagaaatagagcagctcaatgaagtgattgaaaaacttcaacaggaattggcaaatattggacagaagacatcaatgaatgctcattccctctcagaagaagcagacagtttaaaacatcaattggatgtggttatagctgaaaagctggccttggaacagcaagtagaaaccgctaatgaagaaatgaccttcatgaaaaatgtacttaaagaaaccaattttaaaatgaatcagctaacacaggaattattcagcttaaagagagaacgtgaaagtgtggaaaagattcaaagcataccagagaatagtgttaacgtggctatagatcatctgagcaaagacaaacctgaactagaagtagtccttacagaggatgctcttaaatccctagaaaatcagacatacttcaaatcttttgaagaaaatggcaaaggttccataattaatttggaaacaaggttgctacaacttgagagcactgttagtgcaaaggacttagaacttacccagtgttataaacaaataaaagacatgcaagaacaaggccagtttgaaacagaaatgcttcaaaagaagattgtaaacctacagaaaatagttgaagaaaaagtggctgctgctcttgtcagtcaaatccaacttgaggcagttcaggaatatgcaaaattctgtcaagataatcaaacaatttcatcagaacctgaaagaacaaatattcagaatttaaatcaactaagagaagatgagttggggtcagatatatcagcattaaccttgagaatatcagaattagaaagccaggttgttgaaatgcatactagtttgattttagaaaaagaacaagtagaaattgcagaaaaaaatgttttagaaaaagaaaagaagctgctagaactacagaagctattggagggcaatgagaaaaaacagagagagaaagaaaagaaaagaagccctcaagatgttgaagttctcaagacaactactgagctatttcatagcaatgaagaaagtggattttttaatgaactcgaggctcttagagctgaatcagtggctaccaaagcagaacttgccagttataaagaaaaggctgaaaaacttcaagaagagcttttggtaaaagaaacaaatatgacatctcttcagaaagacttaagccaagttagggatcacctcgcagaggcaaaagagaaattgtccattttagaaaaagaagatgagactgaggtacaagaaagcaaaaaggcctgcatgtttgagccacttcctataaaactgagtaagagcattgcatcccagacagatgggactctgaagatcagtagcagcaatcagactccacaaattcttgttaaaaatgcaggaatacaaattaatttacagagtgaatgttcctcagaagaagttactgaaataatcagtcagtttactgaaaaaattgagaagatgcaagaactacatgctgctgaaattttggacatggaatccagacatatttcagaaactgaaaccttaaagagggaacactatgttgccgttcagttactgaaagaggaatgtggtaccttgaaggcagtgatacagtgtctgagaagtaaagaggtatttggtttttataatatgtgtttttcaacattgtgtgattctggatcagactggggtcagggaatttatcttacacacagtcagggatttgacatagcatcagaaggccgaggagaagaaagtgaaagtgcaacagattcctttccaaagaaaataaagggattactgagagctgtccataatgaaggcatgcaggtgctttctctcactgagtctccctatagtgatggagaggaccattctattcagcaggtttcagaaccttggctagaagagagaaaagcttacatcaatacaatctcatctctaaaggatttaattacaaagatgcaactgcaaagagaagccgaggtttatgatagttctcaatctcatgagagcttctcagactggcgaggtgaactactgcttgcccttcaacaagttttcttagaagagcgtagtgttttactagcagcatttcggacggagctgacagctctaggtactacagatgcagttggtttactaaactgtttggaacagagaatacaagaacagggtgttgaatatcaagcagctatggaatgcctccagaaagcagatagaaggagtttgttatctgaaattcaggcactgcatgcacaaatgaatggtaggaaaattactctgaaaagagaacaagagagtgagaaaccaagccaagaactcttggaatataatatacagcagaagcagtctcaaatgctggagatgcaagtggagctcagcagtatgaaagacagagcaacggaactgcaggagcagctgagttctgagaaaatggtggttgctgaactgaagagtgagcttgcacaaactaaattggaactagaaacaacactcaaggcacagcataaacacctaaaagaattggaggctttcaggttggaagttaaagataagacagatgaagtacatttgcttaatgacacattagcaagtgaacagaaaaaatcaagagagctccagtgggctttggagaaagagaaagccaagttgggacgcagtgaagaacgggataaagaagaacttgaggatctgaagttttcacttgagagtcagaaacaaaggaatcttcagctaaatctacttttggaacaacagaaacaactactgaacgaatcccagcaaaaaatagaatcacagagaatgctatatgatgcccagttgtcagaagaacaaggtcgaaacttagagcttcaggtacttcttgaatctgagaaagttcgaattcgggaaatgagtagtaccctagatagggagcgggaattgcacgcacagctgcagagcagtgatggtactggacagtctcggccacccttgccctcagaggacctactgaaagagctgcagaaacagctagaggaaaaacacagtcgcatagtagaattgttaaatgagactgaaaaatataaactggattctttgcaaacacgacagcaaatggaaaaagataggcaggttcacaggaaaacactgcagacagaacaggaggccaacactgagggacagaaaaaaatgcatgagctccagtccaaagtggaagatcttcagcgccagctggaagagaaaagacaacaagtttataagttagaccttgaaggacagcgactacaaggaatcatgcaggaattccagaagcaagaactagaacgagaagaaaaacgagaaagtagaagaattctgtatcagaaccttaatgagccaaccacgtggagcttaaccagtgatagaactagaaattgggttcttcaacagaaaatagaaggagaaacaaaagaatcaaactacgctaaattgattgaaatgaatggaggaggaaccggctgtaatcatgaattagaaatgatcagacaaaagcttcaatgtgtagcttcaaaactacaggttctaccccagaaagcctctgagagactacagtttgaaacagcagatgatgaagatttcatttgggttcaggaaaatattgatgaaattattttacaactacagaaattaactggccagcaaggtgaagagcccagcttggtgtccccaagtacttcttgtggctcattgactgaaagactactgagacaaaatgctgagctgacagggcatatcagtcaactgactgaagagaagaatgacttaaggaacatggttatgaagctggaagagcagatcaggtggtatcgacagacaggagctggtagagataattcttccaggttttcattgaatggtggtgccaacattgaagccatcattgcctctgaaaaagaagtatggaacagagaaaaattgactctccagaaatctttgaaaagggcagaggctgaagtatacaaactgaaagctgaactaagaaatgactctttacttcaaactctgagccctgattctgaacatgtcactttaaagagaatttatggtaaatacttgagggcagaaagttttcgaaaggctctcatttaccagaagaaatacctgctgctgttactgggtgggttccaggaatgtgaagatgccaccttggccctgcttgcccggatgggggggcagccagctttcacggatctagaggtgatcaccaatcgcccaaagggcttcaccaggtttcggtcggccgtcagagtatccattgcaatttccagaatgaaatttttggttcgacggtggcatcgagtcacaggttctgtttccatcaatattaacagagatggctttggactgaatcaaggtgcagaaaagactgactcattttatcattcttctggtgggctggagttatatggagaaccaagacatactacgtatcgctcaagatcagatctggactatattaggtcccctttaccatttcagaataggtacccaggcactccagctgatttcaatcctggttctttagcatgttctcagcttcagaattacgatcctgacagagccctaacagattatatcactcggctagaggcactgcaaagacgacttggaactatacagtcaggttcaactactcaatttcatgctggcatgagaagataatcctttgaaacatcattaattgaagtgattttaaatagatttccttttgtaaatcaatggttcttttgtgcttttgtattgtgaatattcaatgggaccaatatgaacacagcttatgattgtatacaaatcccttgccagcacatgaaaacaaactggaatttgtatatataagcattgtgtatgtattcatgcacaataattattgaattacctgtatatttgtggaatgctaatttaaaacattaaattataaaccttgtgtatttatcaaatgggtgaaaagattaaacttttacgcattacaatactgctgaatgtgtagctcgaggtgtcctgcacttttcttataaggctactgaagttacatgttttgcctaatatattctactggtgatgaagacagataatatcacttgtagagacctatttttgtataatggtagaagttttgaattttatggggtattttgtcaagtactgaaataaaaatgacttcaccattttcaccacact

SEQ ID NO: 24 - DNA, 12450 bp, Human
  AKAP9
gaagatggcggcggcggcggcggtgacggcgcttcccgtgcggctgaggacgatccgccagtgagcgcggagactgcttccacttcgggcgggggagcgccggaccgaatcggctctctaggccgtggagcttgccgtcccacctccgtccaaatcgacctttcctttctatccccaaccacccctcaacccctgttttcccctgccttccttgcagaggccatggaggacgaggagagacagaagaagctggaggccggcaaagccaagcttgcccagtttcgacaaagaaaagctcagtcggatgggcagagtccttccaagaagcagaaaaaaaagagaaaaacgtcaagcagtaaacatgatgtgtcagcacaccatgatttgaatattgatcaatcacagtgtaatgaaatgtacataaatagttctcagagagtagaatcaactgtgattcctgaatctacaataatgagaactctacatagtggagaaataaccagtcatgagcagggcttctctgtggaactggaaagtgaaatttcaaccacagcagatgactgcagttcagaggtaaatggttgcagttttgtgatgagaacaggaaagcctacaaatttattaagggaagaagaatttggtgttgatgattcttattctgaacaaggagcacaagacagtccgactcatctagagatgatggaaagtgagttggctgggaagcagcatgagattgaagagctaaacagagagctggaagaaatgagggttacctatgggactgaaggactgcagcagttacaagaatttgaagctgccattaaacaaagagatggcattataacccagctcactgctaatttacaacaagcaagaagagaaaaggatgagacaatgagagaatttttagagttgacagaacagagtcaaaaattacagattcaatttcagcaattacaggctagtgaaactctgagaaacagcactcatagtagcacagctgcagacttactacaagccaaacaacagatcctcactcatcaacagcagcttgaagaacaagaccacttattagaagattatcagaaaaagaaagaagacttcacaatgcaaattagtttcttgcaagagaaaattaaagtatatgaaatggaacaagataaaaaagtagaaaactcaaataaagaagaaatacaggaaaaggagacaatcattgaagaattaaacacaaaaataatagaagaagaaaagaaaactcttgagctaaaggataaattaacaactgctgataaattactaggagaattacaagaacagattgtgcaaaagaaccaagaaataaaaaacatgaaattagagctgactaattctaagcaaaaagaaagacagtcttctgaagaaataaaacagttaatggggacagtcgaagaacttcagaagagaaatcataaagacagccagttcgaaactgatatagtacaacgaatggaacaagaaacacaaagaaagttagaacaactccgggcagagctggatgagatgtatgggcagcagatagtgcaaatgaaacaagaattaataagacaacacatggcacagatggaggaaatgaaaacacggcataagggagaaatggagaatgctttaaggtcatattcaaatattacagttaatgaagatcagataaagttaatgaatgtggcaataaatgaactgaatataaaattgcaagatactaactctcaaaaggaaaaactcaaggaagaactaggactaattttagaagaaaagtgtgctctacagagacagcttgaagaccttgttgaagaattgagcttttcaagggaacagattcagagagctagacagacaatagctgaacaagaaagtaaacttaatgaagcacataagtcccttagtacagtggaagatttgaaagctgagattgtttctgcatctgaatccagaaaggaactagaattaaaacatgaagcagaagttacaaattacaagataaaacttgaaatgttagaaaaagaaaagaatgctgtgttagacagaatggctgaatcacaagaagctgaattagagaggctgagaacacagcttctatttagtcacgaagaagagctttccaaactgaaggaagatttagaaattgaacatcgaataaatattgaaaaacttaaagataatttaggcattcactataaacagcagatagatggtttacagaatgaaatgagtcaaaagatagaaaccatgcagtttgaaaaggacaatttgataactaagcagaatcaattaattttggaaatttcaaagctaaaagatttacagcagtctcttgtaaattcaaagtcagaagaaatgactcttcaaatcaatgaacttcaaaaagaaattgaaatactcagacaagaagaaaaagaaaagggtacacttgaacaagaagttcaagaattacaacttaaaacagaattgttagaaaaacagatgaaggaaaaagagaatgatcttcaagaaaaatttgcacaacttgaagcagagaatagcattcttaaagatgaaaagaaaacccttgaagacatgttgaaaatacatactcctgttagccaagaagaaagattgattttcttagactccattaagtccaaatccaaagactctgtgtgggaaaaagaaatagaaatacttatagaggaaaatgaggacctcaaacaacaatgtattcagctaaatgaagagattgaaaagcaaaggaacactttttcatttgctgaaaaaaactttgaagttaactatcaagagttacaagaggagtatgcttgccttctcaaagtaaaagatgatttagaagacagtaaaaataaacaggaattagagtataaaagtaaacttaaagcacttaatgaagagcttcatttgcaaagaataaatccaactacagtgaaaatgaaaagttctgtctttgatgaagacaaaacttttgtagcagaaacattggaaatgggtgaggttgttgaaaaggatacaacagaactcatggaaaaacttgaggtaaccaagcgagagaaattagagctgtcacagagactgtctgatctttctgaacaattgaaacagaaacatggtgagattagttttctaaatgaagaagttaaatctttaaagcaagagaaagaacaagtttcattgagatgtagagagctagaaatcattattaaccacaacagggcagaaaatgtacagtcatgtgatactcaagtaagctctttattagatggagttgtgaccatgacaagcaggggtgctgaaggatcagtttctaaagtaaataaaagttttggtgaagaatcaaaaataatggtggaagataaagtttcttttgaaaatatgactgttggagaagaaagtaagcaagaacagttgattttggatcacttaccatctgtaacaaaggaatcatcacttagagcaactcaaccaagtgaaaatgataaacttcagaaagaactcaatgtacttaaatcagaacagaatgatttaaggctacagatggaagcccaacgcatttgcctctctctggtttattcaactcatgtggatcaggttcgtgaatatatggaaaatgaaaaagataaagctctttgcagtcttaaagaagagcttatttttgctcaagaggaaaagatcaaggaacttcagaaaatacaccagttagaactacagactatgaaaacacaagaaacaggtgatgaaggaaagcctttacatctgctcattggaaaacttcaaaaggcagtgtctgaagaatgttcttattttttacagactttatgcagtgtccttggtgaatattatactcctgctttaaaatgtgaagtaaatgcagaagacaaagagaattctggtgattacatttctgaaaatgaagatccagaattacaagattatagatatgaagttcaagactttcaagaaaatatgcacactcttctcaacaaagtaacagaagaatacaacaaactcttggtacttcaaacacgactaagcaagatctggggacagcagacagatggtatgaaacttgaatttggagaagaaaaccttccaaaagaggaaacagagtttttatcaatccattctcagatgaccaatttggaagacattgatgtcaatcataaaagcaagttatcttctctgcaagatcttgaaaaaactaaacttgaagaacaagttcaagaattagaaagcctcatatcctctttgcagcaacagttgaaagaaactgaacaaaactatgaggcagagatccactgtttacagaagaggcttcaagctgttagtgagtccacggttccgccaagcttacctgttgattcggtggtaattacagaatctgatgcacagagaacaatgtaccctggaagttgtgtgaaaaagaatattgatggtacaatagagttttctggtgaatttggagtgaaagaggaaacaaatatcgttaagttgcttgaaaaacaataccaagaacaattagaagaagaagtagctaaggttattgtgtcaatgagtatagcatttgctcaacaaactgaactgtctagaatatctgggggaaaagaaaatactgcatcatcaaagcaagcacatgctgtgtgtcagcaagaacaacattattttaatgaaatgaaattatcacaggatcaaattggttttcagacttttgagacagtggatgtgaaatttaaagaagaatttaaaccacttagtaaagagttaggagaacatggaaaggaaattttattatcaaatagtgatccccatgatataccagaatcaaaggactgtgtgctgactatttcagaagaaatgttctccaaagataaaacatttatagttagacagtctattcatgatgagatttcagtgtcaagcatggatgcttctagacaactaatgttgaatgaagaacagttggaagatatgagacaggaacttgtacgacaataccaagaacatcaacaggcaacggaattgttaaggcaagcacatatgcggcaaatggagagacagcgagaagaccaggaacagctacaagaagagattaagagacttaatagacaattagcccagagatcctccatagataatgaaaacctggtttcagagagagagagggtgcttttagaggagctggaagcactaaagcagctgtctttagctggaagagagaagctgtgttgtgagctgcgcaacagcagtacgcaaacacagaatggaaatgaaaaccaaggagaagttgaagaacaaacatttaaagaaaaggaattagacagaaaacctgaagatgtgcctcctgagattttgtctaatgaaaggtatgcactccagaaagctaataatagacttttgaagatcctcttagaagttgtaaagacaacagcagctgttgaagaaacaattggtcgccatgtccttgggattctagatagatctagtaaaagccagtcatctgccagcctaatttggaggtcagaagcagaggcatctgtaaagtcatgtgtccatgaggaacatacaagagttacagatgaatccattccctcttattctggaagtgatatgccaagaaatgacattaacatgtggtcaaaagtaactgaggaaggaacagagctgtcacaacgacttgtgaggagtggttttgctggaactgaaatagaccctgaaaatgaagaacttatgctgaacattagctctcgactacaagcagcagttgaaaaactcctagaagccataagtgaaactagcagtcagcttgaacatgcgaaagtgacacagacagagttgatgcgtgagtcatttagacagaaacaagaagcaacagagtcccttaagtgccaagaggaacttcgagagcgccttcatgaggagtccagggccagagaacagctagctgtggagctcagtaaggctgagggcgtcattgatggctatgcagatgaaaaaactctttttgaaaggcaaattcaggaaaaaactgatataatagatcgtcttgagcaggagttgttatgtgcaagtaacaggttgcaagaattggaggcagagcaacagcagatccaagaagaaagagaattactgtccagacaaaaggaagctatgaaagcagaggcaggcccagttgaacaacaattactacaggagacagaaaaattaatgaaggaaaaactagaagtacaatgtcaagctgaaaaagtacgtgatgaccttcaaaaacaagtgaaagctctagaaatagatgtggaagaacaagtcagtaggtttatagagctggaacaagaaaaaaatactgaactaatggatttaagacagcaaaaccaagcattggaaaagcagttagaaaaaatgagaaaatttttagatgagcaagccattgacagagaacatgagagagatgtattccaacaggaaatacagaaactagaacagcaacttaaggttgttcctcgattccagcctatcagtgaacatcaaactagagaggttgaacagttagcaaatcatctgaaagaaaaaacagacaaatgcagtgagcttttgctctctaaagagcagcttcaaagggatatacaagaaaggaatgaagaaatagagaaactggagttcagagtaagagaactggagcaggcgcttcttgtagaggaccgaaaacactttggagctgtagaagctaaaccagaattgtccctagaagtacaattgcaggctgaacgagatgccatagacagaaaggaaaaagagattacaaacttagaagagcaattagaacagtttagagaagaactggaaaataagaatgaagaagttcaacaattacatatgcaattagaaatacagaaaaaggaatctactacccgcctacaagaacttgaacaggaaaacaaattatttaaggatgacatggagaaactgggacttgccataaaggaatctgatgccatgtctactcaagaccaacatgtgctatttgggaaatttgctcaaataatacaggaaaaagaggtagaaattgaccaattaaatgaacaagttacgaaactccagcagcaacttaaaattacaacagataacaaggttattgaagaaaaaaatgaactgataagggatcttgaaacccaaatagaatgtttgatgagtgatcaagaatgtgtgaagagaaatagagaagaagaaatagagcagctcaatgaagtgattgaaaaacttcaacaggaattggcaaatattggacagaagacatcaatgaatgctcattccctctcagaagaagcagacagtttaaaacatcaattggatgtggttatagctgaaaagctggccttggaacagcaagtagaaaccgctaatgaagaaatgaccttcatgaaaaatgtacttaaagaaaccaattttaaaatgaatcagctaacacaggaattattcagcttaaagagagaacgtgaaagtgtggaaaagattcaaagcataccagagaatagtgttaacgtggctatagatcatctgagcaaagacaaacctgaactagaagtagtccttacagaggatgctcttaaatccctagaaaatcagacatacttcaaatcttttgaagaaaatggcaaaggttccataattaatttggaaacaaggttgctacaacttgagagcactgttagtgcaaaggacttagaacttacccagtgttataaacaaataaaagacatgcaagaacaaggccagtttgaaacagaaatgcttcaaaagaagattgtaaacctacagaaaatagttgaagaaaaagtggctgctgctcttgtcagtcaaatccaacttgaggcagttcaggaatatgcaaaattctgtcaagataatcaaacaatttcatcagaacctgaaagaacaaatattcagaatttaaatcaactaagagaagatgagttggggtcagatatatcagcattaaccttgagaatatcagaattagaaagccaggttgttgaaatgcatactagtttgattttagaaaaagaacaagtagaaattgcagaaaaaaatgttttagaaaaagaaaagaagctgctagaactacagaagctattggagggcaatgagaaaaaacagagagagaaagaaaagaaaagaagccctcaagatgttgaagttctcaagacaactactgagctatttcatagcaatgaagaaagtggattttttaatgaactcgaggctcttagagctgaatcagtggctaccaaagcagaacttgccagttataaagaaaaggctgaaaaacttcaagaagagcttttggtaaaagaaacaaatatgacatctcttcagaaagacttaagccaagttagggatcacctcgcagaggcaaaagagaaattgtccattttagaaaaagaagatgagactgaggtacaagaaagcaaaaaggcctgcatgtttgagccacttcctataaaactgagtaagagcattgcatcccagacagatgggactctgaagatcagtagcagcaatcagactccacaaattcttgttaaaaatgcaggaatacaaattaatttacagagtgaatgttcctcagaagaagttactgaaataatcagtcagtttactgaaaaaattgagaagatgcaagaactacatgctgctgaaattttggacatggaatccagacatatttcagaaactgaaaccttaaagagggaacactatgttgccgttcagttactgaaagaggaatgtggtaccttgaaggcagtgatacagtgtctgagaagtaaagagggatcctcaattcctgagctagcacattctgatgcttaccagactagagaaatatgctccagtgattctggatcagactggggtcagggaatttatcttacacacagtcagggatttgacatagcatcagaaggccgaggagaagaaagtgaaagtgcaacagattcctttccaaagaaaataaagggattactgagagctgtccataatgaaggcatgcaggtgctttctctcactgagtctccctatagtgatggagaggaccattctattcagcaggtttcagaaccttggctagaagagagaaaagcttacatcaatacaatctcatctctaaaggatttaattacaaagatgcaactgcaaagagaagccgaggtttatgatagttctcaatctcatgagagcttctcagactggcgaggtgaactactgcttgcccttcaacaagttttcttagaagagcgtagtgttttactagcagcatttcggacggagctgacagctctaggtactacagatgcagttggtttactaaactgtttggaacagagaatacaagaacagggtgttgaatatcaagcagctatggaatgcctccagaaagcagatagaaggagtttgttatctgaaattcaggcactgcatgcacaaatgaatggtaggaaaattactctgaaaagagaacaagagagtgagaaaccaagccaagaactcttggaatataatatacagcagaagcagtctcaaatgctggagatgcaagtggagctcagcagtatgaaagacagagcaacggaactgcaggagcagctgagttctgagaaaatggtggttgctgaactgaagagtgagcttgcacaaactaaattggaactagaaacaacactcaaggcacagcataaacacctaaaagaattggaggctttcaggttggaagttaaagataagacagatgaagtacatttgcttaatgacacattagcaagtgaacagaaaaaatcaagagagctccagtgggctttggagaaagagaaagccaagttgggacgcagtgaagaacgggataaagaagaacttgaggatctgaagttttcacttgagagtcagaaacaaaggaatcttcagctaaatctacttttggaacaacagaaacaactactgaacgaatcccagcaaaaaatagaatcacagagaatgctatatgatgcccagttgtcagaagaacaaggtcgaaacttagagcttcaggtacttcttgaatctgagaaagttcgaattcgggaaatgagtagtaccctagatagggagcgggaattgcacgcacagctgcagagcagtgatggtactggacagtctcggccacccttgccctcagaggacctactgaaagagctgcagaaacagctagaggaaaaacacagtcgcatagtagaattgttaaatgagactgaaaaatataaactggattctttgcaaacacgacagcaaatggaaaaagataggcaggttcacaggaaaacactgcagacagaacaggaggccaacactgagggacagaaaaaaatgcatgagctccagtccaaagtggaagatcttcagcgccagctggaagagaaaagacaacaagtttataagttagaccttgaaggacagcgactacaaggaatcatgcaggaattccagaagcaagaactagaacgagaagaaaaacgagaaagtagaagaattctgtatcagaaccttaatgagccaaccacgtggagcttaaccagtgatagaactagaaattgggttcttcaacagaaaatagaaggagaaacaaaagaatcaaactacgctaaattgattgaaatgaatggaggaggaaccggctgtaatcatgaattagaaatgatcagacaaaagcttcaatgtgtagcttcaaaactacaggttctaccccagaaagcctctgagagactacagtttgaaacagcagatgatgaagatttcatttgggttcaggaaaatattgatgaaattattttacaactacagaaattaactggccagcaaggtgaagagcccagcttggtgtccccaagtacttcttgtggctcattgactgaaagactactgagacaaaatgctgagctgacagggcatatcagtcaactgactgaagagaagaatgacttaaggaacatggttatgaagctggaagagcagatcaggtggtatcgacagacaggagctggtagagataattcttccaggttttcattgaatggtggtgccaacattgaagccatcattgcctctgaaaaagaagtatggaacagagaaaaattgactctccagaaatctttgaaaagggcagaggctgaagtatacaaactgaaagctgaactaagaaatgactctttacttcaaactctgagccctgattctgaacatgtcactttaaagagaatttatggtaaatacttgagggcagaaagttttcgaaaggctctcatttaccagaagaaatacctgctgctgttactgggtgggttccaggaatgtgaagatgccaccttggccctgcttgcccggatgggggggcagccagctttcacggatctagaggtgatcaccaatcgcccaaagggcttcaccaggtttcggtcggccgtcagagtatccattgcaatttccagaatgaaatttttggttcgacggtggcatcgagtcacaggttctgtttccatcaatattaacagagatggctttggactgaatcaaggtgcagaaaagactgactcattttatcattcttctggtgggctggagttatatggagaaccaagacatactacgtatcgctcaagatcagatctggactatattaggtcccctttaccatttcagaataggtacccaggcactccagctgatttcaatcctggttctttagcatgttctcagcttcagaattacgatcctgacagagccctaacagattatatcactcggctagaggcactgcaaagacgacttggaactatacagtcaggttcaactactcaatttcatgctggcatgagaagataatcctttgaaacatcattaattgaagtgattttaaatagatttccttttgtaaatcaatggttcttttgtgcttttgtattgtgaatattcaatgggaccaatatgaacacagcttatgattgtatacaaatcccttgccagcacatgaaaacaaactggaatttgtatatataagcattgtgtatgtattcatgcacaataattattgaattacctgtatatttgtggaatgctaatttaaaacattaaattataaaccttgtgtatttatcaaatgggtgaaaagattaaacttttacgcattacaatactgctgaatgtgtagctcgaggtgtcctgcacttttcttataaggctactgaagttacatgttttgcctaatatattctactggtgatgaagacagataatatcacttgtagagacctatttttgtataatggtagaagttttgaattttatggggtattttgtcaagtactgaaataaaaactgaaataaaaatgacttcaccattttcaccacact

SEQ ID NO: 25 - protein, 247 aa, Human
  TMEM33
MADTTPSGPQGAGAVQFMMTNKLDTAMWLSRLFTVYCSALFVLPLLGLHEAASFYQRALLANALTSALRLHQRLPHFQLSRAFLAQALLEDSCHYLLYSLIFVNSYPVTMSIFPVLLFSLLHAATYTKKVLDARGSNSLPLLRSVLDKLSANQQNILKFIACNEIFLMPATVFMLFSGQGSLLQPFIYYRFLTLRYSSRRNPYCRTLFNELRIVVEHIIMKPACPLFVRRLCLQSIAFISRLAPTVP

SEQ ID NO: 26 - DNA, 2684 bp, Human
  TMEM33
aataacctggagccggcggcgtaggttggctctttagggcttcaccccgaagctccaccttcgctcccgtctttctggaaacaccgctttgatctcggcggtgcgggacaggtacctcccggctgctgcgggtgccctggatccagtcggctgcaccaggcgagcgagacccttccctggtggaggctcagagttccggcagggtgcatccggcctgtgtgtggcgcgaggcagggaagccggtacccgggtcctggccccagcgctgacgttttctctcccctttcttctctcttcgcggttgcggcgtcgcagacgctagtgtgagcccccatggcagatacgaccccgagcggcccccaaggggcgggcgctgtgcaattcatgatgaccaataaactggacacggcaatgtggctttctcgcttgttcacagtttactgctctgctctgtttgttctgcctcttcttgggttgcatgaagcagcaagcttttaccaacgtgctttgctggcaaatgctcttaccagtgctctgaggctgcatcaaagattaccacacttccagttaagcagagcattcctggcccaggctttgttagaggacagctgccactacctgttgtattcactcatctttgtaaattcctatccagttacaatgagtatcttcccagtcttgttattctctttgcttcatgctgccacatatacgaaaaaggtccttgacgcaaggggctcaaatagtttacctctgctgagatctgtcttggacaaattaagtgctaatcaacaaaatattctgaaattcattgcttgcaatgaaatattcctgatgcctgcgacagtttttatgctttttagtggtcaaggaagtttgctccaaccttttatatactatagatttcttacccttcgatattcgtctcgaagaaacccatattgtcggaccttatttaatgaactgaggattgttgttgaacacataataatgaaacctgcttgcccactgtttgtgagaagactttgtctccagagcattgcctttataagcagattggcaccaacagttccatagtttaacatctagttaagctacaaatatagtataagcattattagcagctggtacttctgctaggggttgtaaattccaggtgttacactgacctcaatccaatttacataatttacataaatgcatctcggtggaaaaataatcattttcttggcatgttaaatcaagcttaaaaagttttgagaaaattttactgtgctgtgttgctaatggttaaagaagtctgtatctagtgataaatataccagtttttttaaaaagatgctgttgtgcctatatcatgaagtacattaatttctcatgtaaaaaaaatagctctaaaatttgtttcaacctaattggtaacctgagtttatatctggcatgaattcattatggtgatacacatatgtgaattcagtacattttgagacagtattctaccattcagtaattttggttaatgattttaacacttctcagtgtatttaatttcaaattgtttttttaattggttttatgctgctttgttaggacagatgtgttttgaatgtaccattataagaagaattctatgtatcttaaactatgatcttctaaaattttatttccgtaagtacttctgtggccttgagtattttttaaaaggctcaactgtaagcctcttagccagttggataaatatttggggtcacctagccattgaaagcagaaagcagtagtgacacagctttcccttcaaagagccattgagaaacatttctcaaacaggaaatccttcttttactaatgtggacatatagattattcgtattatagtttgtagaactacctagttcagaatcttgactgccagttttcttggtttcttaggcttgaattttcatagacaattgcaacagtttagatgccttttgaaaggaatgtaatgaagattcagcatctgactatatgtgtgtctatcctgaaataataatggagagtatactgtagattacatgtttacccatcaaatctgacttaaaaggttaaatggaaggttttataggtaaggtaattgattgggaatggggtagggggaggagttgtgggggaataatgtgcatttcagtctcaacgcatagataaatttaggggaattggatgcattattcaactttgatttgggttgtaaaatgtgttaaatcctgttcattgaactcccatcaactcttatgaaattcatgctgatcttcattaccgttgcatgattggaaatgtttaaaacattgtacagttttagtatagagaaatgtaatggtttttgtgaccagtttctgtctgcatgtaatttggatttctcaaatacattcattagtaatttatcagtaacattagttttatttttgttcatctccttatctataaaaaggggatattcttaggataaatacatgaaaaattatacttgatagcttaactataatcagctatttttgtatttttgtaatatttgtccactaagctggagaagcagcctcatacagttgattttgtgtatgtggctagtcttattgtcactatgtaagtaatccaatggttttagaaactaaactttctagagcaataaaatgactataatgttaagt

SEQ ID NO: 27 - protein, 2037 aa, Human
  SETD1B
MCGYWEPSLRRQPPPGQQQQQRRRQRQQLRAREAGARRGCKRGSGRERPRPAAGRPKPPAPALARAGERAGGRRRRQALPPASRQSRAELAEAAAAAAAAETTTTCWFSGWVNGMENSHPPHHHHQQPPPQPGPSGERRNHHWRSYKLMIDPALKKGHHKLYRYDGQHFSLAMSSNRPVEIVEDPRVVGIWTKNKELELSVPKFKIDEFYVGPVPPKQVTFAKLNDNIRENFLRDMCKKYGEVEEVEILYNPKTKKHLGIAKVVFATVRGAKDAVQHLHSTSVMGNIIHVELDTKGETRMRFYELLVTGRYTPQTLPVGELDAVSPIVNETLQLSDALKRLKDGGLSAGCGSGSSSVTPNSGGTPFSQDTAYSSCRLDTPNSYGQGTPLTPRLGTPFSQDSSYSSRQPTPSYLFSQDPAVTFKARRHESKFTDAYNRRHEHHYVHNSPAVTAVAGATAAFRGSSDLPFGAVGGTGGSSGPPFKAQPQDSATFAHTPPPAQATPAPGFKSAFSPYQTPVAHFPPPPEEPTATAAFGARDSGEFRRAPAPPPLPPAEPLAKEKPGTPPGPPPPDTNSMELGGRPTFGWSPEPCDSPGTPTLESSPAGPEKPHDSLDSRIEMLLKEQRTKLLFLREPDSDTELQMEGSPISSSSSQLSPLAPFGTNSQPGFRGPTPPSSRPSSTGLEDISPTPLPDSDEDEELDLGLGPRPPPEPGPPDPAGLLSQTAEVALDLVGDRTPTSEKMDEGQQSSGEDMEISDDEMPSAPITSADCPKPMVVTPGAAAVAAPSVLAPTLPLPPPPGFPPLPPPPPPPPPQPGFPMPPPLPPPPPPPPPAHPAVTVPPPPLPAPPGVPPPPILPPLPPFPPGLFPVMQVDMSHVLGGQWGGMPMSFQMQTQVLSRLMTGQGACPYPPFMAAAAAAASAGLQFVNLPPYRGPFSLSNSGPGRGQHWPPLPKFDPSVPPPGYMPRQEDPHKATVDGVLLVVLKELKAIMKRDLNRKMVEVVAFRAFDEWWDKKERMAKASLTPVKSGEHKDEDRPKPKDRIASCLLESWGKGEGLGYEGLGLGIGLRGAIRLPSFKVKRKEPPDTTSSGDQKRLRPSTSVDEEDEESERERDRDMADTPCELAKRDPKGVGVRRRPARPLELDSGGEEDEKESLSEEQESTEEEEEAEEEEEEEDDDDDDSDDRDESENDDEDTALSEASEKDEGDSDEEETVSIVTSKAEATSSSESSESSEFESSSESSPSSSEDEEEVVAREEEEEEEEEEMVAEESMASAGPEDFEQDGEEAALAPGAPAVDSLGMEEEVDIETEAVAPEERPSMLDEPPLPVGVEEPADSREPPEEPGLSQEGAMLLSPEPPAKEVEARPPLSPERAPEHDLEVEPEPPMMLPLPLQPPLPPPRPPRPPSPPPEPETTDASHPSVPPEPLAEDHPPHTPGLCGSLAKSQSTETVPATPGGEPPLSGGSSGLSLSSPQVPGSPFSYPAPSPSLSSGGLPRTPGRDFSFTPTFSEPSGPLLLPVCPLPTGRRDERSGPLASPVLLETGLPLPLPLPLPLPLALPAVLRAQARAPTPLPPLLPAPLASCPPPMKRKPGRPRRSPPSMLSLDGPLVRPPAGAALGRELLLLPGQPQTPVFPSTHDPRTVTLDFRNAGIPAPPPPLPPQPPPPPPPPPVEPTKLPFKELDNQWPSEAIPPGPRGRDEVTEEYMELAKSRGPWRRPPKKRHEDLVPPAGSPELSPPQPLFRPRSEFEEMTILYDIWNGGIDEEDIRFLCVTYERLLQQDNGMDWLNDTLWVYHPSTSLSSAKKKKRDDGIREHVTGCARSEGFYTIDKKDKLRYLNSSRASTDEPPADTQGMSIPAQPHASTRAGSERRSEQRRLLSSFTGSCDSDLLKFNQLKFRKKKLKFCKSHIHDWGLFAMEPIAADEMVIEYVGQNIRQVIADMREKRYEDEGIGSSYMFRVDHDTIIDATKCGNFARFINHSCNPNCYAKVITVESQKKIVIYSKQHINVNEEITYDYKFPIEDVKIPCLCGSENCRGTLN

SEQ ID NO: 28 - DNA, 8531 bp, Human
  SETD1B
atgtgcggctactgggagccgagcctccgccgccagccgcctcccgggcagcagcagcagcagcggcggcggcagcggcagcagctccgggcccgggaggccggcgcccggcggggatgtaagcgcggctcggggagggagaggccgcggccggcagccgggcggcccaagcccccggccccggccctggcccgagcgggcgagcgggcgggcgggcggcggcgccgccaggccctgccgccagcctcgcgccagagccgggccgagctagcggaagcggccgccgccgccgccgcggcggagacgacaacaacttgctggttttcaggttgggttaacggcatggagaacagtcaccccccccaccaccaccaccagcagcccccgccgcagcccggcccttcgggcgagaggaggaaccaccattggagaagttacaagttgatgattgacccggctctgaaaaaggggcatcataaactgtaccgctacgatgggcagcatttcagcctggcgatgtccagcaaccgcccggtggaaattgtcgaagatccccgggtcgtcgggatctggaccaaaaacaaggagctggagctgtcggtgcccaaattcaagatcgatgagttctacgtgggcccggtgcctccgaagcaggtgacatttgccaagctgaatgataacatccgtgaaaacttcctgagggacatgtgcaagaagtatggggaggtggaggaggtggagattttgtacaaccccaagaccaagaagcacctgggcatcgccaaggtggtctttgccacggtccggggagccaaggatgccgttcagcacttgcacagcacttccgtcatgggcaacattatccacgtggagctggacaccaaaggggaaacccgaatgcggttctatgaactgttggtcactggccgatacaccccccagaccctcccagtgggcgagctggacgctgtctctccaatcgtgaatgagaccctgcagctgtcagatgccctgaagcgcctcaaggatggaggcctgtctgcaggctgtggctccggctcctcctctgtcacccccaatagcggtgggacacccttctcccaggacacagcttattccagctgccgcctggacacacccaactcctatggacagggcaccccgctcacaccgcgcctgggcacccctttctcacaggactccagctactccagccgccagcccacaccctcatacctcttcagccaggaccctgcagtgaccttcaaggcccggcgccacgagagcaagttcacggacgcctacaaccgccgccacgaacatcattatgtacacaattctcccgcggtcactgcggtggccggggccacagccgctttccggggttcctcggacctcccgttcggagcagtcggcggcactgggggcagcagcggtcccccgttcaaggctcaaccacaggattcagccacatttgcccacactccaccacccgcccaagcaacccctgctcctggattcaagtctgctttctctccgtatcagaccccagtggcccacttccctccacccccggaagagcccaccgccacagccgcttttggggcccgcgacagtggggagttccggagggcaccggcgcccccacccctgccacctgctgagcctctggccaaggagaagccaggcacgccacccggcccgccgccccccgacaccaacagcatggagctgggcggccggcccaccttcggctggagtcctgagccctgtgacagccctggcacgcccacgctggagtcgtcccctgcagggccagagaaaccccacgacagcctggactcgcgcatcgagatgctgctgaaggagcagcgcaccaagctgctcttcctgagggagccggactcggacaccgagctgcagatggagggcagccccatctcctcctcctcctcccagctctccccactggccccctttggcaccaactcccagccaggcttccggggccccacgcccccctcgtcacgcccctccagcaccggcctggaggatatcagcccaacacccctcccagactccgacgaggacgaggagctcgacctgggccttgggcctcggcctccacctgagccaggccccccggaccctgctgggcttctgagccagacagctgaggtggccttggacctggttggagacagaaccccgacctcagagaagatggatgagggccagcagtcctcaggcgaggacatggagatctcggatgacgagatgccctcggcccccatcaccagcgctgactgccccaagcccatggtggtgaccccaggagcggcagccgtggcagccccttctgtgctagccccaaccctgccgctgcccccgccacctggcttccccccgctgccccccccaccaccaccacccccaccgcagcctggcttccccatgcccccaccgctgcccccaccgccgcccccaccccctccagcccaccctgctgtgacagtgcccccaccacccttgccagcgccgcctggagtcccgcccccacccatcctgccaccactgcccccctttccgccgggcctgttccctgtgatgcaggtggacatgagccacgtgctgggtggccagtggggcggcatgcccatgtccttccagatgcaaacgcaggtgctcagccggctgatgacgggccagggcgcctgcccctacccgcccttcatggccgctgcggccgccgctgcctcagctgggctccagtttgtcaacctgccgccctaccggggccccttctccctgagcaactccggcccaggccgcgggcagcactggccaccactgcccaagtttgacccgtcagtgcctccaccaggctacatgccacgccaggaggacccacacaaagccacggtggatggcgtcctgctggtggtcctcaaagaactcaaggccatcatgaagcgtgacctgaaccgcaagatggtggaagtggtggctttccgggcctttgacgagtggtgggacaagaaggagcggatggccaaggcctcgctgaccccggtgaagtcgggcgagcacaaggacgaggacaggccgaagcccaaggaccgcatcgcctcgtgcctgctggagtcatggggcaagggcgagggcctgggctacgagggcctgggcctgggcattgggctgcgtggggccattcgcctgccctccttcaaggtcaagaggaaggagccaccagacaccacctcatctggcgaccagaagcggctgcggccctcgacctctgtggatgaggaagatgaagagtccgagcgagagcgagaccgggatatggcagacaccccctgtgagctcgccaagcgggaccccaagggcgtgggtgtgcggcggcggccggcgcggcctctggagctggacagtggtggggaggaggacgagaaggagtcattgtcggaggaacaggagagcaccgaggaggaagaggaggcggaggaggaggaggaggaggaagatgacgacgatgacgacagtgatgaccgggacgagtctgagaacgatgacgaggacacagccctgtcagaggcgagtgagaaggacgaaggggactcggatgaagaggagacagtgagcattgtaacctccaaggccgaagccacgtcgtccagtgagagttccgagtcttctgagtttgagtcaagctccgagtcctcgccctcatcctcggaggatgaggaggaggtagtggccagggaagaggaggaagaagaggaggaggaggagatggtggccgaggaaagcatggcttctgcaggccctgaggactttgagcaggacggggaggaagcggctctggccccgggggcacctgcagtggactcgttgggcatggaagaggaggtggacatcgagactgaggctgtggcccctgaggagcggccctccatgctggacgagccccccttgcctgtgggtgttgaagagccagcggactccagggagccgcctgaggaaccaggcctgagccaggaaggggccatgttgctgtctccagagccccctgccaaggaggtggaggctcgacccccattgtcccctgagcgagctccagaacatgacctggaagtggagccggagccccctatgatgctccccttgccgctgcaaccaccattgccgcccccacgaccaccccggccacccagcccaccgccggagcctgagaccacagatgcctcacacccatctgtccctccggagccccttgccgaggaccaccccccgcatactccaggcctctgtggcagcctggccaagtcgcagagcacagagacggtgccagccacaccaggcggggagcccccgctatcagggggcagcagtggcctgtccctgagctctccgcaagtgcccggcagccccttctcctacccagccccgtcccctagcttgagcagtgggggcctccctcggacacctggccgggacttcagcttcacacccaccttctccgagcccagcgggcccttgctcctgcccgtctgcccactccccactggccgacgcgatgaacgctccgggcccctggcctccccggtgctcctggagacgggcctgcccctccctctgccccttcccctgcccttgcccttggcattgcccgccgtcttgcgggcccaggctcgtgcgcccaccccgctgccacccctgctgcccgcccccctggcctcttgccctcccccaatgaagaggaagccgggccggccccggcgatccccaccatctatgctctccttggatgggcccttggtccgaccaccagcaggggccgcccttggaagggaactcctgctcctgccgggccagccacagacccccgtcttccccagcacccatgacccccggacggtgaccctggacttccggaacgcggggatcccagcccctccaccaccccttcccccccagccacccccacccccacctcccccacctgtagagcccaccaagctgccctttaaggagctagacaaccagtggccctccgaggccattcctccgggcccccgtgggcgcgatgaggtcactgaggaatacatggagttggccaagagccgggggccgtggcgccggccacctaagaagcgccatgaggacctggtgccacctgcgggctcgcccgaactctcgccaccccagcccctcttccggccccgctcggagtttgaggagatgaccatcctgtatgacatctggaacggtggcatcgatgaggaggacatccgcttcctgtgtgtcacctacgagcgactgctacagcaggacaatggcatggactggcttaacgacacgctctgggtctaccatccctccaccagcctctcttcagctaagaagaagaaacgggacgatggcatccgcgagcacgtgacgggctgtgcccgcagtgagggcttctacaccatcgacaagaaggacaagctcagatacctcaacagcagccgtgccagcaccgatgagccccccgcagacacccagggcatgagcatcccagcacagccccacgcctccacccgggcaggctcggagcggcgttcggagcagcgccgcctgctgtcctccttcactggcagctgtgacagtgacctgctcaagttcaaccagctcaagttccggaagaaaaagctcaagttctgcaagagccacattcacgactggggcttgttcgccatggagcccatcgcggctgacgagatggtcatcgagtacgtgggccagaatatccgtcaggtgatcgcagacatgcgggagaagcgttatgaggacgagggcatcgggagcagctacatgttccgggtggaccatgacaccatcatcgacgccaccaagtgcggcaacttcgcgcgcttcatcaaccacagctgcaaccccaactgctatgccaaggtgatcacggtggagtcacagaagaagatagtcatctactcgaagcagcacattaacgtcaatgaggagattacctatgactataagttccccatcgaggacgtcaagatcccctgcctctgtggctccgagaactgccgggggaccctcaactaggccccggcaccagactcaaaggatgtcagccgtagccctgggactcccgagcgtggagcccctggccccggggcccggccccccgcgcccgcccccatttcaggtgctgtcctctacccagcggccattcagggcctggcgccccacactaccccctggagcccctggctccggcccctccgcgggaaagggcttctctgtcgttcagcccacgtctctctcattttaacaaacgcccctttcaggatttctgtttaactccagcatcagcttctctctctccgtctctcctcccctctctctcttctctgtctcttctctctcccaccatcaccctcggcctcttcctgtgaatgctgctacgttgttttgtcttctctatttttttcctcgttgtgagaaaagacatttaaccgttgaaatgtgaaggtggaatcagagaggggccccgcgggggtctgcagaggcctcagtgtggctgtgcgtggcccgtgtcctggaagccacccggacctggacgcagggccaggtgctgtgggaaggatggaggcccccacggccttgacctcagaacactacgccctgaaagcgcccctcactgcccgtgggcacagtgaggagaccccacacctttccccacccgagctgcagcctgttccttccccagaggcctggggcaccactgacccggtggaccctgatggagctaagctgtcccaggcaggggtctccgctctgggctttccctgccacctcacaccccagcaccccctaaaccttgggttcaatgtttactttctcattcggatgccagcaacgcgggagcctctcggaggccccagtgcaggtgaggggcgctgagaacgcgggcagccactctcttctgcccttgccttcgccctgggtgggacagggctcccaagggcaggcgggtcccccagtcccgccattacgggttgtcagaccgtctgcgtgtggcattttttggcttataagcttcacccactcacccccaacccacaccccacatccccctgccggcagcccctcaacctaagaaggccagagcatatttattttcggagggagcagattacttctcccagagaaaggaaaatcttggaaaagatttaaaaacacaaatctaagccttgacggtttttttttcccttttgacccccttcccatctcttcagaatttattcccatggcttttttttttcttgtgcgtgtataaaatcaaaaggaaggggaaaaaggtttttgaagttcagaaccaacttctgtatatagaggctgccgcaaaggactttctcttgggaacattgtttcttgtagaaacatgcgggaagacattttttgctcatttctttgtacttccaaaaaaaaaggaaaaaaaagacaaaagcaagtccccccgtaccccagaaagcagaggaggcgtgtaaataatttctggaaagtgactgttgtgacccggagtcctcatcaagatgagcgcgctccatgagggagctgctcccaccctgcggacgcaggcggccggagcctctggtatctcagcttgtgtcaagcttgttatcatgtaaattctgtacaaagaattgttatttttctcttttttgttgttggtggttttgttgtgtgttttttgttgttttttttttattcctttcccccaggccctctctatttgagactgtgcccgccggtttcaagatcaaggaaattggtggcaacaagacacagatggggtacctgggcacagcggcgaacttctcttccgtttgcggttttctgcctaattgtgcaactgaggaaataatttatttttcacatgaggaaatgcgtagcttgtagagacggctgattcaagttacatgtacagcctccaaagggctgtctccattctgtccccttcccataaaagaagtgggggtgttcgagaagaccagggaagggacccttgcctcacccctccccctggcctcaccttgctcccagccatcgtgcccagtgttaacctcggctggccttcactaaggggactagacctccctctccccaggagccccagccccagagtggtttgcaataatcaagatatgtgtcgagtcatttttctttcaactccctcatttttcattgaacaaatctctgcttttcaagagttgggggtttctgctattttttgctttctctccctccccctgcaaagatgagaaccaatgagttttagggatgtttgtgcgggtagactccatcatccatatgtaacttgttttgaagagaagtgtttccgttgtgtgtcttgatgtaaatatttgttcatatttttgtgaattcaatactatgtaccattgtattatagtaacttttataaagcaaaccataaatatactgacttttcttacaga

SEQ ID NO: 29 - protein, 2624 aa, Human
  BDP1
MFRRARLSVKPNVRPGVGARGSTASNPQRGRESPRPPDPATDSASKPAEPTDVPTVDFGGAEPQEKAPRSSTEKTGGDNDVEESSRSSSTVSQRRKRISSTSSLVKSSVSVPSESHPLSTINQEAPQPTATSTKEKQPCSDRYRIYKAQKLREMLKEELRKEKKQWKNKYAINESQRPPDRSKMTMRDFIYYLPDNNPMTSSLEQEKKTEKPSTPVQTREQEGKSTPNAEDNEMEEETDDGPLLVPRVKVAEDGSIILDEESLTVEVLRTKGPCVVEENDPIFERGSTTTYSSFRKNYYSKPWSNKETDMFFLAISMVGTDFSMIGQLFPHRARIEIKNKFKREEKTNGWRIDKAFQEKRPFDFDFFAHLLQKVLAEEEKRKQKSVKNHSLKEKKSTKPRKNVKVKKVACEGVNNDPDESMSSRISDTERSQKDAQTVEEESLTLSREDAEQVALEVDLNQKKRRRKKQDGANELGVNNLLENATVQAGPSKGEKHKNKCQAIRPELKEGECSKEQMLSCTQNIDGIVGFASTEKVEKRTDPILSLSNQQDATSVATESSESSTSDLPSFEVGIRALCEVNNAEGSCIEERNVDLKNNSLEIDQTENVKPMLRGRFQRPKPNLSRAGKKSVLSQGKTESESKNSHSKTSVEKNHVEKDKMNTLDILRMETTERENPEAETVSVLGEKNCLQEGSQLKALRPVQVRGRLQKPKPNAGKAAERKEILISQEEIGANVEKNENESCADRDTPQHMEDQSRKDFEEEDVILQPEKNDSFQNVQPDEPKVLNECLSVQENNKANKLNQVPILRTRFQKPKPNIGRGTGRREISSKEEVLEKILVSGEMAAALRETVRLDTSPKEMVPAEINTKEMQSDLKETGRRAISPREKILDVIDDTIEMETGLKAMGREICLREKTPEVIDATEEIDKDLEEAGRREISPQKNGPEEVKPLGEVETDLKATGNESSPREKTPEVTDATEEIDKNLEETGRRKISPRENGPEEVKPVDEMETDLNATGRESSPREKTPEVIDATEEIDLEETEREVSPQENGLEEVKPLGEMETDLKATGRDSFPRGKTPEVIDAIEEIEIDLEETEREISPQENGLEEVKPLGEMQTDLKATGREISPREKTPEVIDATEEIDKDLEETGRREISPEENGPEEVKPVDEMETDLKTTGREGSSREKTREVIDAAEVIETDLEETEREISPQENGPEEVKPVGKMETDLKEIREEISQREKVLAEFSAIREKEIDLKETGKRDIPIMEKVSGKMAVVEEMEADLKETGKENFRERGSEEICVTEEKVAELKQTGKTDISPRENELEETSTSRQTDTHLMQSGSNDFSAVPSLDIQNISSEVLSMMHTPVEEKRNSEKEVSSHFSHFKISSQTHESDKTEVQGIQSPDVPEQFSDINLSKSLPQEQKPLEIKPAPFVRSRFKRPKPNLARAALKRETTESEKYIYEKKSETKKMETIVMQENNEQTDTLPSQHDEASLMISREKDTLGHRNEEAVILPCTQTERNLSPSNSCEPKEESQSAPVQKNDSVVSVGTNNVNTFQQEMKESVIQTARQVRGRLQRPRPNIRKTGQRQIVDKGEAKGIIKEGRTILPKDETEKKVLTVSNSQIETEIEVPSSAVPEHRMYENQSQVVLVENLHVNKTNETIRHENKPYVPSSAQMTRRKFQKAKPNLGRAHSKKEEPVLEKVTTDQSKEGKPEDHLLQKGASNTQLLLKEKAELLTSLEVSARKDCVGSKESALAKIDAELEEVGPSRRVGEETVGDNSPSSVVEEQYLNKLTSCPQPLNETSYSKIALDGKTTISSTSEYERNRGERRSHKKFKPNVTRGRGSKRVRGKTSKKEPRASKAMLVTLRASQEEDDDADDFESDYEEESYHLAPEEVNKAPVFVPVGLRSPEPVSAQIEETMEELEITVNVPDVGCIAVVEHELPNTDVTTEEMKQEENLSVPFEMTTSEHIQDEPGTNDGSTEAAITLLTMGDLVLQSEISSEQGDVGVCIIPHVHSKDKSHIPSSLDNVNHKIVHECQELSSPVITTSPASFEENKIVLEEQSSREEISLMEKVKENATPTRNTISKVTSNLRIRSRLAKPKPNLEKTLGTNRLDDYQEVSSLCVTKGAEMETQRETEKNASKATELENKNLGPVTTAENKDQSKLACVHGIKGTSISSEVNLTERNENQEESSQEVHMLSVAPVASSETGPCTLGLDRGLGENSVEEPQIKDSKGDSVLTLPVPEYTPTSIPEVQQENIINPQDLTVNLVANVPQDGEDEQAFILTLVEIPANAVEEFTDATAQFMPNPLLPAPILVKSVNTEERGDMSICLPATSVGQDAMGLSISGRDNSKKPPDNLDLVSRKRFQCRLDKNDHIPPAKKRSLTLRDDCQEYTTEVHSKELTNVFEETGESHKGQDIFLTSGSTLTTPEPQRQQVEAAFQSRGSRSPDACMDKNVPQLPQDEMIVSDKEERTDAAPKSQQMDSRTSSSKASLSRPGRRPLGFLSLICSKNSLESDEPMQVHSKKRLKPLIPGLRKKLKRSNPFNESQEKNRESSDLLPSPSVITTQSENISSSATQVSCDQPLLKEGYKSAQKRAPQGEATTVSEYFFNDIFIEVDETE

SEQ ID NO: 30 - DNA, 11097 bp, Human
  BDP1
agttgcggcgtcctgtgagcgcggggatgctgggaggagggtgaaatttagccatcggtgtgtggcagggtcatgaaaaagcggcggcggcgggagagaggaggaggcggcggcggggcagtgaaactacggtagctgccccctgagctggtggtgtggctttgtggggagggcgtagttcctaatcccctttccgggcagccgccggggctcggggctgtgagcggccgtgaggctgcctccccgggccccctgcctccgccatgttccgcagggcacgccttagcgtgaagccgaatgtcaggcctggtgtaggcgccaggggctccacagcttccaatccccagcgtggacgggagtctcccaggccgccggatcctgccacggactctgcttccaagcccgcggagcccacagatgtgcccacagtcgatttcggtggagcggagccccaagaaaaggctcctaggagcagtactgaaaagactggtggtgacaatgatgttgaagaatccagtagatcttcctctactgtttcacagagaagaaagcgaatatcaagtacttctagcctggttaagtctagtgtcagtgttccttcagaatctcatcccttatctacaattaatcaagaggctccacagccaactgccacttcaacaaaagagaaacagccatgctcagacagataccgaatatacaaagcccagaaactgagggaaatgttaaaagaagaattgagaaaagagaagaaacaatggaaaaacaaatatgctataaatgaaagtcagaggccaccagatcgttcaaaaatgactatgagagacttcatatattatctaccagataataatccaatgacttcttcactggaacaagaaaagaaaactgaaaagccatcgactccagtccagacaagagagcaagaaggtaagagtactcctaatgctgaagataatgaaatggaagaagagacagatgatgggccattactggttcctcgagtaaaagtggcagaagatggttccattattttggatgaagaaagtttaactgtagaagttttaagaacaaaaggcccttgtgttgttgaagaaaatgaccccatatttgagcgcggttctacaactacatactccagctttaggaaaaactattactctaaaccatggtcaaataaagaaacagatatgttttttttagccatcagcatggtaggaactgacttttctatgatcggacaactttttcctcacagagcaaggatagaaattaagaataaatttaaacgggaagagaaaacaaatggatggagaatagacaaagcattccaggaaaagcgcccttttgacttcgatttttttgctcatttgcttcagaaagttcttgctgaagaagagaaaagaaaacaaaaatctgttaaaaatcacagtttaaaggagaagaaatccaccaaaccacggaaaaatgtaaaagtgaaaaaagttgcctgtgaaggagtgaataatgatccagatgagtctatgagttctagaatttcagacacggaaagatctcagaaggatgctcagacagttgaagaagagtctctgaccttatcaagggaggatgcagagcaggttgcattagaagtagacctaaatcaaaagaaaagaaggaggaagaagcaagatggagctaatgaactgggagtaaacaatcttttagaaaatgccactgttcaggcgggtccttctaaaggagaaaaacacaagaataaatgtcaggctataaggcctgagctaaaggaaggtgaatgcagtaaggagcagatgctttcctgcacacaaaacatagatggcattgtgggttttgcctccactgaaaaagttgagaaaagaactgaccccatcctttcattaagtaatcaacaagatgccacatcagtagcaactgagtcttcagaatcaagcacttcagatttgccttcattcgaagttggaattagagcattgtgtgaggtgaataatgctgagggtagttgtatagaagaaagaaatgttgacctaaaaaataattcactggaaattgatcaaacagaaaatgttaaaccaatgttgagaggtcgcttccaaagacctaaacccaatttgtcaagggctgggaagaaatcagttctttcacaaggcaaaacagagtcagagagcaagaattcacattcaaaaacttcagttgaaaagaaccacgtggaaaaagataaaatgaatacattggacattttgagaatggagactacagagagagagaatccagaagctgaaactgtatctgttttgggtgaaaaaaattgtctgcaggaagggagtcaactaaaggctttaagacctgtacaagtgaggggccgattgcaaaagccaaagccaaatgcaggtaaagctgctgaaagaaaagaaattctcatatcacaggaagaaattggggccaatgtagagaagaatgaaaatgaatcctgtgctgatagagatactcctcaacacatggaagatcaatcgcgtaaagattttgaagaggaagatgtcatattacagcctgagaaaaatgattcttttcaaaatgtgcagccagatgagcccaaggttcttaatgaatgtctaagcgttcaagagaataataaggcaaataaacttaaccaagtcccaattctaaggactcgatttcagaaaccaaagccaaatataggaagaggaactggaaggagagaaatttcctcaaaggaagaggtactagagaagattcttgtctctggggaaatggcggcagcattgagagaaactgtaagactagacacctcaccaaaggagatggtaccagcagagattaatactaaagaaatgcagtcagatttaaaagaaactggaagaagagccatttctcccagggagaagattctagatgtgattgatgacaccatagaaatggagacaggtctgaaagcaatgggaagagagatttgtctaagggagaagacgccagaggtgattgatgccactgaggaaatagacaaagatttggaagaagctggaagaagagaaatatccccacagaaaaatggcccagaggaggttaagcctctaggtgaagtggagacagatttgaaagcaactggaaatgagagttccccaagggagaagacaccagaggtgactgatgccactgaggaaatagacaaaaatttggaagaaactggaagaagaaaaatatccccaagggaaaatggcccagaggaggtcaagcctgtagatgaaatggagacagatttgaacgcaactggaagagagagttctccaagggagaagacaccagaggtgattgatgctactgaggaaatagatttggaagaaactgaaagagaagtatccccacaggaaaatggactagaggaggtcaagcctctaggtgaaatggagacggatttgaaagcaactggaagagacagtttcccaagggggaagacaccagaggtgattgatgccattgaggaaatagagatagatttggaagaaactgaaagagaaatatccccacaggaaaatggcctagaggaggttaagcctctaggtgaaatgcaaacagatttgaaagcaaccggaagggagatttccccaagggagaagacaccagaggtgattgatgccactgaggaaatagacaaagatctggaagaaactggaagaagagaaatatccccagaggaaaatggcccagaggaggtcaagcctgtagatgaaatggagacagacttgaaaacaactggaagagagggttcctcaagggagaagacacgagaggtgattgatgctgctgaggtaatagagacagatttggaagaaactgaaagagaaatatcgccacaggaaaatggcccagaggaggtcaagcctgtaggtaaaatggagacagatttgaaagaaattagagaagaaatttcccaaagggaaaaggtgctagcagagttcagtgctataagggaaaaggagattgatttgaaagaaactggaaaaagagacattcccatcatggagaaagtatcaggaaagatggctgttgttgaagaaatggaggcagatttgaaagaaactggaaaagaaaattttagagagagaggatctgaagagatctgtgttactgaggaaaaggtggcagaattgaaacaaactggaaaaacagacatttctccaagggaaaacgagctagaggagaccagtacctcaagacaaactgacacacatttaatgcagagcggtagcaatgacttcagtgctgtgccttcactagatattcagaacattagcagtgaagtactgtcgatgatgcatacacctgtagaagaaaaaagaaattctgaaaaagaagtatcaagtcacttcagtcatttcaagatttcttcacagactcatgaatctgataaaacagaagtccaggggattcaatctccagatgttccagagcagttttcagatattaatttaagcaaatctcttcctcaagaacagaagccacttgaaattaaaccagcaccttttgtgaggagccgattcaaaagaccaaaaccaaacttagcaagagcagctttgaagagagagactacagaatcagaaaaatatatatatgagaagaaatcagaaaccaagaaaatggagactattgtgatgcaagaaaataatgaacaaactgatactctcccttctcaacatgatgaagcttccctaatgatatcaagagaaaaagacacattaggtcacaggaatgaggaggctgtgatattgccatgtacacagactgaaaggaacctttcaccttcaaattcttgtgaacctaaagaggagtctcagtcagcaccagtccagaaaaatgactcagttgtttctgtggggactaataatgtaaacactttccagcaagaaatgaaggaaagtgttatccaaactgctcgacaagtaaggggccgacttcagagaccgagaccaaatataagaaagacaggacagaggcaaatagtagacaaaggtgaagccaaaggcataattaaggaaggaagaacgatattaccaaaagatgaaactgaaaagaaagtcttaactgtgtcaaattctcaaattgaaactgaaattgaagttccatcgtccgcagttccagaacacagaatgtatgaaaatcaaagtcaggtggttcttgtagaaaaccttcatgttaacaaaacaaatgaaacaatcagacatgaaaataaaccgtatgttcctagttcagcacaaatgacaagaaggaaattccaaaaggctaagccaaatttgggaagagcacacagtaagaaagaggaaccagttttagaaaaagtcacaacagatcagagcaaggaaggcaagccagaagatcatttgctgcagaaaggagcttccaacacccagctccttctaaaagaaaaagctgagcttctgacatctctggaggtttcagcaagaaaagattgtgtaggttccaaagagtctgctttggcaaaaatagatgcggaattagaagaagttggaccatcaagaagggttggagaggaaactgtaggagataattcaccatcttcagttgttgaagagcaatatctcaataaactaacaagctgtccacaaccgttaaacgaaacaagttactctaaaattgccctggatgggaaaacaactatctcttctacatctgagtatgagagaaatcgtggtgaaaggagaagtcataaaaagttcaaaccaaatgtcaccagaggtcgtggatcaaaacgagttcggggtaagacctctaagaaggaacctagagcttccaaggccatgctggtgactcttcgggcttcccaggaagaagatgatgatgctgacgattttgagtctgactatgaggaagaaagctatcatcttgctcccgaagaagtaaacaaagctccagtatttgtacctgttggtctcagatctcctgaacctgtttctgctcagattgaggaaacaatggaagagcttgaaataactgtgaatgtcccagatgtaggatgcatagctgttgttgaacatgagctaccaaacacagatgtgactactgaagaaatgaaacaagaagaaaatttgagtgtaccgtttgaaatgaccacaagtgaacatatccaagatgaaccaggtaccaatgatggaagcaccgaagctgcaataactttacttacaatgggagatctagtattgcagtcagagatcagtagtgaacagggtgatgtaggagtatgtataattcctcatgttcattcaaaggataaaagccatattccttctagcctagataatgtaaatcacaaaattgttcatgaatgtcaggaactttcttcacctgtcattactacatctcctgcatcatttgaagaaaacaagattgtattggaggaacaaagttccagagaagaaataagtttaatggagaaagtaaaggagaatgctacaccaaccaggaatacaatttctaaagtgaccagtaatttgagaataagaagtaggcttgctaagcctaaaccaaatcttgagaagactttagggaccaacaggcttgatgattatcaggaagtttccagtttgtgtgtaaccaaaggggcagaaatggaaactcaaagagaaacagagaaaaatgcttccaaagcaacagaattggaaaataaaaacctcggaccagttacaacagcagagaataaggatcagagcaaattggcatgtgtacatggtatcaaagggaccagtatttcttcagaagtaaacctaactgaaagaaacgaaaatcaagaagagagctctcaggaggttcacatgttgtcagttgctccagttgcttcctctgagacagggccctgcacacttggtttggataggggtcttggtgaaaattctgttgaagagccccagataaaggactctaaaggagacagtgtgcttacacttcctgtgccagagtatacaccaacaagtattccagaagtccaacaagagaatataatcaatcctcaagacctaacagtgaatctagttgctaatgtacctcaagatggagaagatgaacaagcctttattttaactctggtggaaatcccagccaatgcagtagaagaatttactgatgccactgcacagttcatgccaaaccctttactgccagctcccatattggtcaaatcagtgaataccgaagaaaggggtgacatgagtatttgtttaccagcaacttcagttggtcaagatgccatgggtttatctatttctggaagagataattctaaaaagccgcctgataatttggatcttgtatctaggaagagatttcaatgcaggcttgataaaaatgaccacattcctcctgccaaaaaacgttcactcactttaagagatgactgtcaagaatataccactgaggtgcactcaaaggaattaacaaatgtttttgaggaaacaggggagtctcacaagggacaagatatttttcttacctcaggaagcacactgacaactccagaacctcaaagacagcaagttgaagcagcttttcagagtagaggatctagatctcctgatgcatgcatggacaagaatgtgcctcagttacctcaggatgaaatgattgtgtctgataaggaagaaagaactgatgctgctcctaagtctcagcaaatggatagcagaacatcgtcttctaaagcctcactatccagacctggcagaagacccctgggatttttatctttaatatgctcaaagaatagtttggagtctgatgaacctatgcaagtccatagtaagaaacgcctaaaacctcttatacctggattaagaaagaaattgaaaagatctaatccattcaatgaaagccaggaaaaaaatcgagagtcctctgatctgcttccatctccaagtgttattactactcaatctgagaatattagcagctcagcaactcaggtttcttgtgatcagcccttactgaaagaaggatataaaagtgcccaaaagcgggcccctcaaggggaggcaaccacagtctctgaatatttcttcaatgatatcttcattgaagtggatgaaacagaataaaacaatcttttctctttttcttttttaaattaggtctaggatttccagagtcaattacatcaacaaaacagtatttagagcaaaatatcactgtcttatttttctttaggttgattttgaatacttaatgagcttgatttgaagcttttataatcagtggaaaacatttctgaggttcctttcattctgactgattcagcattttgcaaatagcaagcaattaagactgctttctcagacagaaataacaactcttgtttacattttgactcttcctgtgctaagcacacatggacatttgggaatgttgtggatatatgtctctgtatgaattgcagtgcagacagatttgggggttaattgtatcatatttaacatttagcaacttcttttgtgaagattttttatttttagggggagatgatgaaggatgaaggctttttcatttgcttctaagtacagtcatgtatcacataatgaagtttaagtcaatgatggaccacatatattacagtggtcccatgcaattaaaatggagataaattcctatcaactagtgacattatagccatcataacacagtgcattgcttttttatgtttagatatgtttagatacacaaatacttactattgtgttacaactgcctacagtattcagcatagtaacacattgtagaggtttgtagccgaggagcaataggctataccacatagcctcagtctgtacggtgtgtagcagcctgtaccatctcagtgtttgtaagtacactctgcgttgtttcacacaagatcacctaacaaggcaattcttagaacatgtagttaagggacacgtgactatatgtgaaaacaaattgtcaaacttcactttagtatggcaaatgttaaagaacttttctattatcagctgtttgtctgactgaaaaatacatatttttctaattcatggtgatgtaacattagtcctaattgaaaaactagtatttaaacataattatttataaagatgacacatcaaagggcttatttatttttaaattttttatttaaaaggatattcagttttagctatttttacccctcagattgtagataaagaaggcattaaatttatgtttgtctcctttttctgtttaattttaaagatatttaaaatgatataactaaaaatgtttagctggtgtatatgttttgaatacctttttcccctcagtttagtatattgactttgtactgtaaatttttctgcttttcttggataatctcaggattttcatgaggatagggggaactcaactttatttatgagacaaaatttccatacaaagctcaatctcctttatacacccacagacataatattagtttttaaaaagccaatttcttcatagttttttcccattaaattctcaaggaacacttggatctttaagcacggaacataatcatgatgttaaaaacagagaaaataaggctttataaagttaatgattatcatcagtatgaatttaaggtttgttttaatttcaagatttgattttttatacgtgtaattctattatctacccaagcagatctgtagtggttccaattagacttctcaaacagcaaatttatcctgattttatttgaaaagcctcttggattgatagtatagtagctcaggcattggaaactttctgcaaactgttttgggtttgcaggccagatggtctctgtggcagctactcagctctgcaatttcagtgtgaaagaagccatagacagtacttgaatgaaggactgtggctggattggccttttagtttgaccccctacattaggccccaaattttcttaccctgaggtgctgatatctgtatggatgagttatttgtcactaaagttatgagttgtgcctaaaagttaaaactgttgactgtattatgtaatgatcagtatttcagttgggaagatattttagagtctagataattatgtttgtatattgaaaaaatggtggccagtttttaagttccttaatagaagagaattatgtctcagcacatataacagtaatgctaatttattgaaactactgctgttagagcacttcttattcattgtcttttagtgaaatttatggcgtaacactttgtcagagaggaggctatataattcggagcggaaattgtctataagtaggcatttatttcatgattgatatgtcacagaaatcatggtagtaaatcacattgctatttgaataccctgtttttgtaagtttttaaaactcatattctgaaaagatttcattctcttagtgttagcttgggagttagattgccatgattaaactattatttatccttgtgtaatattagtttttaactttaacatctgtttctttttaatctataatgagctagttttatggaaaatggaatttcttactatataaagaatacagagactcattgtattagagaatcaagtcagccagctaaagtatcctactgttaaatccttaaacctaattttggaaaagagaaagttaatcaatgtatttaccttacatgttggaaagaactatgttaggtctgattcatgtgaagaagatgttgcaaaggatttatttcacaaattttaaaggagatatgagtaaaagtttttatcttttcttgactttttctcctgaacacttatgtcttagcaagtggtcaacatgaggatttgaacgcctaattgttggtaaatggttgaggcatgacaaaaatattaatatccactgtttaccatcatgttatttgaaacaaaagtgaccatgtatactatcttgcttgaagaagtctttgacagaaaaagcaatatcatgtcatttataaattttcttgttctaaagaaagcagttatatatatatataaattatgtaaataaaagttattttatatcattaaaaaaaaaaaaaaaaaaaaaa

SEQ ID NO: 31 - protein, 2479 aa, Human
  CEP290
MPPNINWKEIMKVDPDDLPRQEELADNLLISLSKVEVNELKSEKQENVIHLFRITQSLMKMKAQEVELALEEVEKAGEEQAKFENQLKTKVMKLENELEMAQQSAGGRDTRFLRNEICQLEKQLEQKDRELEDMEKELEKEKKVNEQLALRNEEAENENSKLRRENKRLKKKNEQLCQDIIDYQKQIDSQKETLLSRRGEDSDYRSQLSKKNYELIQYLDEIQTLTEANEKIEVQNQEMRKNLEESVQEMEKMTDEYNRMKAIVHQTDNVIDQLKKENDHYQLQVQELTDLLKSKNEEDDPIMVAVNAKVEEWKLILSSKDDEIIEYQQMLHNLREKLKNAQLDADKSNVMALQQGIQERDSQIKMLTEQVEQYTKEMEKNTCIIEDLKNELQRNKGASTLSQQTHMKIQSTLDILKEKTKEAERTAELAEADAREKDKELVEALKRLKDYESGVYGLEDAVVEIKNCKNQIKIRDREIEILTKEINKLELKISDFLDENEALRERVGLEPKTMIDLTEFRNSKHLKQQQYRAENQILLKEIESLEEERLDLKKKIRQMAQERGKRSATSGLTTEDLNLTENISQGDRISERKLDLLSLKNMSEAQSKNEFLSRELIEKERDLERSRTVIAKFQNKLKELVEENKQLEEGMKEILQAIKEMQKDPDVKGGETSLIIPSLERLVNAIESKNAEGIFDASLHLKAQVDQLTGRNEELRQELRESRKEAINYSQQLAKANLKIDHLEKETSLLRQSEGSNVVFKGIDLPDGIAPSSASIINSQNEYLIHLLQELENKEKKLKNLEDSLEDYNRKFAVIRHQQSLLYKEYLSEKETWKTESKTIKEEKRKLEDQVQQDAIKVKEYNNLLNALQMDSDEMKKILAENSRKITVLQVNEKSLIRQYTTLVELERQLRKENEKQKNELLSMEAEVCEKIGCLQRFKEMAIFKIAALQKVVDNSVSLSELELANKQYNELTAKYRDILQKDNMLVQRTSNLEHLECENISLKEQVESINKELEITKEKLHTIEQAWEQETKLGNESSMDKAKKSITNSDIVSISKKITMLEMKELNERQRAEHCQKMYEHLRTSLKQMEERNFELETKFAELTKINLDAQKVEQMLRDELADSVSKAVSDADRQRILELEKNEMELKVEVSKLREISDIARRQVEILNAQQQSRDKEVESLRMQLLDYQAQSDEKSLIAKLHQHNVSLQLSEATALGKLESITSKLQKMEAYNLRLEQKLDEKEQALYYARLEGRNRAKHLRQTIQSLRRQFSGALPLAQQEKFSKTMIQLQNDKLKIMQEMKNSQQEHRNMENKTLEMELKLKGLEELISTLKDTKGAQKVINWHMKIEELRLQELKLNRELVKDKEEIKYLNNIISEYERTISSLEEEIVQQNKFHEERQMAWDQREVDLERQLDIFDRQQNEILNAAQKFEEATGSIPDPSLPLPNQLEIALRKIKENIRIILETRATCKSLEEKLKEKESALRLAEQNILSRDKVINELRLRLPATAEREKLIAELGRKEMEPKSHHTLKIAHQTIANMQARLNQKEEVLKKYQRLLEKAREEQREIVKKHEEDLHILHHRLELQADSSLNKFKQTAWDLMKQSPTPVPTNKHFIRLAEMEQTVAEQDDSLSSLLVKLKKVSQDLERQREITELKVKEFENIKLQLQENHEDEVKKVKAEVEDLKYLLDQSQKESQCLKSELQAQKEANSRAPTTTMRNLVERLKSQLALKEKQQKALSRALLELRAEMTAAAEERIISATSQKEAHLNVQQIVDRHTRELKTQVEDLNENLLKLKEALKTSKNRENSLTDNLNDLNNELQKKQKAYNKILREKEEIDQENDELKRQIKRLTSGLQGKPLTDNKQSLIEELQRKVKKLENQLEGKVEEVDLKPMKEKNAKEELIRWEEGKKWQAKIEGIRNKLKEKEGEVFTLTKQLNTLKDLFAKADKEKLTLQRKLKTTGMTVDQVLGIRALESEKELEELKKRNLDLENDILYMRAHQALPRDSVVEDLHLQNRYLQEKLHALEKQFSKDTYSKPSISGIESDDHCQREQELQKENLKLSSENIELKFQLEQANKDLPRLKNQVRDLKEMCEFLKKEKAEVQRKLGHVRGSGRSGKTIPELEKTIGLMKKVVEKVQRENEQLKKASGILTSEKMANIEQENEKLKAELEKLKAHLGHQLSMHYESKTKGTEKIIAENERLRKELKKETDAAEKLRIAKNNLEILNEKMTVQLEETGKRLQFAESRGPQLEGADSKSWKSIVVTRMYETKLKELETDIAKKNQSITDLKQLVKEATEREQKVNKYNEDLEQQIKILKHVPEGAETEQGLKRELQVLRLANHQLDKEKAELIHQIEANKDQSGAESTIPDADQLKEKIKDLETQLKMSDLEKQHLKEEIKKLKKELENFDPSFFEEIEDLKYNYKEEVKKNILLEEKVKKLSEQLGVELTSPVAASEEFEDEEESPVNFPIY

SEQ ID NO: 32 - DNA, 7972 bp, Human
  CEP290
atttgaagtcctcgttccacgccttctcatcatcctgaacaccgagctctgggactccggcggagaatctaaacgtaaagcatcacccacggtcgtgaactgtaggctctcctggcatccgggatcttattctggccttggcggagttggggatggtgtcgcctagcagccgctgccgctttggcttgctcgggaccatttggctggacccagagtccgcgtggaaccgcgatagggatctgtcagggcccgcggccgggtccagcttggtggttgcggtagtgagaggcctccgctggttgccaggcttggtctagaggtggagcacagtgaaagaattcaagatgccacctaatataaactggaaagaaataatgaaagttgacccagatgacctgccccgtcaagaagaactggcagataatttattgatttccttatccaaggtggaagtaaatgagctaaaaagtgaaaagcaagaaaatgtgatacaccttttcagaattactcagtcactaatgaagatgaaagctcaagaagtggagctggctttggaagaagtagaaaaagctggagaagaacaagcaaaatttgaaaatcaattaaaaactaaagtaatgaaactggaaaatgaactggagatggctcagcagtctgcaggtggacgagatactcggtttttacgtaatgaaatttgccaacttgaaaaacaattagaacaaaaagatagagaattggaggacatggaaaaggagttggagaaagagaagaaagttaatgagcaattggctcttcgaaatgaggaggcagaaaatgaaaacagcaaattaagaagagagaacaaacgtctaaagaaaaagaatgaacaactttgtcaggatattattgactaccagaaacaaatagattcacagaaagaaacacttttatcaagaagaggggaagacagtgactaccgatcacagttgtctaaaaaaaactatgagcttatccaatatcttgatgaaattcagactttaacagaagctaatgagaaaattgaagttcagaatcaagaaatgagaaaaaatttagaagagtctgtacaggaaatggagaagatgactgatgaatataatagaatgaaagctattgtgcatcagacagataatgtaatagatcagttaaaaaaagaaaacgatcattatcaacttcaagtgcaggagcttacagatcttctgaaatcaaaaaatgaagaagatgatccaattatggtagctgtcaatgcaaaagtagaagaatggaagctaattttgtcttctaaagatgatgaaattattgagtatcagcaaatgttacataacctaagggagaaacttaagaatgctcagcttgatgctgataaaagtaatgttatggctctacagcagggtatacaggaacgagacagtcaaattaagatgctcaccgaacaagtagaacaatatacaaaagaaatggaaaagaatacttgtattattgaagatttgaaaaatgagctccaaagaaacaaaggtgcttcaaccctttctcaacagactcatatgaaaattcagtcaacgttagacattttaaaagagaaaactaaagaggctgagagaacagctgaactggctgaggctgatgctagggaaaaggataaagaattagttgaggctctgaagaggttaaaagattatgaatcgggagtatatggtttagaagatgctgtcgttgaaataaagaattgtaaaaaccaaattaaaataagagatcgagagattgaaatattaacaaaggaaatcaataaacttgaattgaagatcagtgatttccttgatgaaaatgaggcacttagagagcgtgtgggccttgaaccaaagacaatgattgatttaactgaatttagaaatagcaaacacttaaaacagcagcagtacagagctgaaaaccagattcttttgaaagagattgaaagtctagaggaagaacgacttgatctgaaaaaaaaaattcgtcaaatggctcaagaaagaggaaaaagaagtgcaacttcaggattaaccactgaggacctgaacctaactgaaaacatttctcaaggagatagaataagtgaaagaaaattggatttattgagcctcaaaaatatgagtgaagcacaatcaaagaatgaatttctttcaagagaactaattgaaaaagaaagagatttagaaaggagtaggacagtgatagccaaatttcagaataaattaaaagaattagttgaagaaaataagcaacttgaagaaggtatgaaagaaatattgcaagcaattaaggaaatgcagaaagatcctgatgttaaaggaggagaaacatctctaattatccctagccttgaaagactagttaatgctatagaatcaaagaatgcagaaggaatctttgatgcgagtctgcatttgaaagcccaagttgatcagcttaccggaagaaatgaagaattaagacaggagctcagggaatctcggaaagaggctataaattattcacagcagttggcaaaagctaatttaaagatagaccatcttgaaaaagaaactagtcttttacgacaatcagaaggatcgaatgttgtttttaaaggaattgacttacctgatgggatagcaccatctagtgccagtatcattaattctcagaatgaatatttaatacatttgttacaggaactagaaaataaagaaaaaaagttaaagaatttagaagattctcttgaagattacaacagaaaatttgctgtaattcgtcatcaacaaagtttgttgtataaagaatacctaagtgaaaaggagacctggaaaacagaatctaaaacaataaaagaggaaaagagaaaacttgaggatcaagtccaacaagatgctataaaagtaaaagaatataataatttgctcaatgctcttcagatggattcggatgaaatgaaaaaaatacttgcagaaaatagtaggaaaattactgttttgcaagtgaatgaaaaatcacttataaggcaatatacaaccttagtagaattggagcgacaacttagaaaagaaaatgagaagcaaaagaatgaattgttgtcaatggaggctgaagtttgtgaaaaaattgggtgtttgcaaagatttaaggaaatggccattttcaagattgcagctctccaaaaagttgtagataatagtgtttctttgtctgaactagaactggctaataaacagtacaatgaactgactgctaagtacagggacatcttgcaaaaagataatatgcttgttcaaagaacaagtaacttggaacacctggagtgtgaaaacatctccttaaaagaacaagtggagtctataaataaagaactggagattaccaaggaaaaacttcacactattgaacaagcctgggaacaggaaactaaattaggtaatgaatctagcatggataaggcaaagaaatcaataaccaacagtgacattgtttccatttcaaaaaaaataactatgctggaaatgaaggaattaaatgaaaggcagcgggctgaacattgtcaaaaaatgtatgaacacttacggacttcgttaaagcaaatggaggaacgtaattttgaattggaaaccaaatttgctgagcttaccaaaatcaatttggatgcacagaaggtggaacagatgttaagagatgaattagctgatagtgtgagcaaggcagtaagtgatgctgataggcaacggattctagaattagagaagaatgaaatggaactaaaagttgaagtgtcaaaactgagagagatttctgatattgccagaagacaagttgaaattttgaatgcacaacaacaatctagggacaaggaagtagagtccctcagaatgcaactgctagactatcaggcacagtctgatgaaaagtcgctcattgccaagttgcaccaacataatgtctctcttcaactgagtgaggctactgctcttggtaagttggagtcaattacatctaaactgcagaagatggaggcctacaacttgcgcttagagcagaaacttgatgaaaaagaacaggctctctattatgctcgtttggagggaagaaacagagcaaaacatctgcgccaaacaattcagtctctacgacgacagtttagtggagctttacccttggcacaacaggaaaagttctccaaaacaatgattcaactacaaaatgacaaacttaagataatgcaagaaatgaaaaattctcaacaagaacatagaaatatggagaacaaaacattggagatggaattaaaattaaagggcctggaagagttaataagcactttaaaggataccaaaggagcccaaaaggtaatcaactggcatatgaaaatagaagaacttcgtcttcaagaacttaaactaaatcgggaattagtcaaggataaagaagaaataaaatatttgaataacataatttctgaatatgaacgtacaatcagcagtcttgaagaagaaattgtgcaacagaacaagtttcatgaagaaagacaaatggcctgggatcaaagagaagttgacctggaacgccaactagacatttttgaccgtcagcaaaatgaaatactaaatgcggcacaaaagtttgaagaagctacaggatcaatccctgaccctagtttgccccttccaaatcaacttgagatcgctctaaggaaaattaaggagaacattcgaataattctagaaacacgggcaacttgcaaatcactagaagagaaactaaaagagaaagaatctgctttaaggttagcagaacaaaatatactgtcaagagacaaagtaatcaatgaactgaggcttcgattgcctgccactgcagaaagagaaaagctcatagctgagctaggcagaaaagagatggaaccaaaatctcaccacacattgaaaattgctcatcaaaccattgcaaacatgcaagcaaggttaaatcaaaaagaagaagtattaaagaagtatcaacgtcttctagaaaaagccagagaggagcaaagagaaattgtgaagaaacatgaggaagaccttcatattcttcatcacagattagaactacaggctgatagttcactaaataaattcaaacaaacggcttgggatttaatgaaacagtctcccactccagttcctaccaacaagcattttattcgtctggctgagatggaacagacagtagcagaacaagatgactctctttcctcactcttggtcaaactaaagaaagtatcacaagatttggagagacaaagagaaatcactgaattaaaagtaaaagaatttgaaaatatcaaattacagcttcaagaaaaccatgaagatgaagtgaaaaaagtaaaagcggaagtagaggatttaaagtatcttctggaccagtcacaaaaggagtcacagtgtttaaaatctgaacttcaggctcaaaaagaagcaaattcaagagctccaacaactacaatgagaaatctagtagaacggctaaagagccaattagccttgaaggagaaacaacagaaagcacttagtcgggcacttttagaactccgggcagaaatgacagcagctgctgaagaacgtattatttctgcaacttctcaaaaagaggcccatctcaatgttcaacaaatcgttgatcgacatactagagagctaaagacacaagttgaagatttaaatgaaaatcttttaaaattgaaagaagcacttaaaacaagtaaaaacagagaaaactcactaactgataatttgaatgacttaaataatgaactgcaaaagaaacaaaaagcctataataaaatacttagagagaaagaggaaattgatcaagagaatgatgaactgaaaaggcaaattaaaagactaaccagtggattacagggcaaacccctgacagataataaacaaagtctaattgaagaactccaaaggaaagttaaaaaactagagaaccaattagagggaaaggtggaggaagtagacctaaaacctatgaaagaaaagaatgctaaagaagaattaattaggtgggaagaaggtaaaaagtggcaagccaaaatagaaggaattcgaaacaagttaaaagagaaagagggggaagtctttactttaacaaagcagttgaatactttgaaggatctttttgccaaagccgataaagagaaacttactttgcagaggaaactaaaaacaactggcatgactgttgatcaggttttgggaatacgagctttggagtcagaaaaagaattggaagaattaaaaaagagaaatcttgacttagaaaatgatatattgtatatgagggcccaccaagctcttcctcgagattctgttgtagaagatttacatttacaaaatagatacctccaagaaaaacttcatgctttagaaaaacagttttcaaaggatacatattctaagccttcaatttcaggaatagagtcagatgatcattgtcagagagaacaggagcttcagaaggaaaacttgaagttgtcatctgaaaatattgaactgaaatttcagcttgaacaagcaaataaagatttgccaagattaaagaatcaagtcagagatttgaaggaaatgtgtgaatttcttaagaaagaaaaagcagaagttcagcggaaacttggccatgttagagggtctggtagaagtggaaagacaatcccagaactggaaaaaaccattggtttaatgaaaaaagtagttgaaaaagtccagagagaaaatgaacagttgaaaaaagcatcaggaatattgactagtgaaaaaatggctaatattgagcaggaaaatgaaaaattgaaggctgaattagaaaaacttaaagctcatcttgggcatcagttgagcatgcactatgaatccaagaccaaaggcacagaaaaaattattgctgaaaatgaaaggcttcgtaaagaacttaaaaaagaaactgatgctgcagagaaattacggatagcaaagaataatttagagatattaaatgagaagatgacagttcaactagaagagactggtaagagattgcagtttgcagaaagcagaggtccacagcttgaaggtgctgacagtaagagctggaaatccattgtggttacaagaatgtatgaaaccaagttaaaagaattggaaactgatattgccaaaaaaaatcaaagcattactgaccttaaacagcttgtaaaagaagcaacagagagagaacaaaaagttaacaaatacaatgaagaccttgaacaacagattaagattcttaaacatgttcctgaaggtgctgagacagagcaaggccttaaacgggagcttcaagttcttagattagctaatcatcagctggataaagagaaagcagaattaatccatcagatagaagctaacaaggaccaaagtggagctgaaagcaccatacctgatgctgatcaactaaaggaaaaaataaaagatctagagacacagctcaaaatgtcagatctagaaaagcagcatttgaaggaggaaataaagaagctgaaaaaagaactggaaaattttgatccttcattttttgaagaaattgaagatcttaagtataattacaaggaagaagtgaagaagaatattctcttagaagagaaggtaaaaaaactttcagaacaattgggagttgaattaactagccctgttgctgcttctgaagagtttgaagatgaagaagaaagtcctgttaatttccccatttactaaaggtcacctataaactttgtttcatttaactatttattaactttataagttaaatatacttggaaataagcagttctccgaactgtagtatttccttctcactaccttgtacctttatacttagattggaattcttaataaataaaattatatgaaattttcaacttattaaaaaaaaaaaaaaaaaa

SEQ ID NO: 33 - DNA, 18815 bp, Human
  AHNAK
agacccgcccgcccgagccggagttacaagagccgcctccgcgcacgggggcccggccactcggagctgctctgccgcggggactgcaccgcccgccctgccagacccgcccggaacggggctcgtcgccgccagtagccgcagcaccgcagccttgggcctcgcgccggctatggccgtgccctggggctgagccctcaggttgtgaccgagattcccgacgagagagactgaggggaagagaggaaggaggggcgggctcctggcaaggcattcgctcctgagcggaatcctgcaaagatggagaaggaggagacaacccgggagctgctgctgcccaactggcagggtagtggctcccacgggctgaccatcgcccagagggacgacggcgtctttgtgcaggaggtgacgcagaactcccctgcggcccgcactggggtggtcaaggagggggaccagattgtgggtgccaccatctactttgacaacctgcagtcgggtgaggtgacccagctgctgaacaccatggggcaccacacggtgggcctgaagctgcaccgcaagggggaccgctctcccgagcctggccagacctggacccgtgaagtcttcagctcctgcagctctgaagtggttctgagcggggatgatgaggagtaccagcgcatctacaccacgaagatcaagccacggctgaagtcggaagatggagtggaaggagacctcggggagacccagagccgtaccatcacagtgaccagaagggtcacggcctacactgtggatgtgactggccgggaaggagccaaggacatagacatcagtagccctgaattcaagatcaagattccaagacatgaactgactgaaatctccaatgtggatgtggagacccagtctgggaagaccgtgatcagactgccctcgggctcgggggcagcctctccgacaggctctgctgtggatatccgagcaggggccatttctgcttcaggaccagagctccaaggtgctggccactcgaagctccaggtcaccatgcctgggataaaggtgggaggctcaggtgtcaatgtcaatgcaaagggcttggacttgggtggcagaggaggggtccaagttccagcagtggacatttcatcttctcttgggggtagggcagtagaggtacagggcccatctctggagagtggtgatcatggcaaaattaaatttcccaccatgaaagtgccgaaatttggtgtctcaacagggcgtgagggccagacaccaaaggcagggctgagggtttctgcacctgaagtctctgtggggcacaagggcggcaagccaggcttgactatccaagcccctcagctggaagtcagtgtgccctctgccaatattgagggccttgaggggaagctgaagggcccccaaatcactgggccatcacttgagggtgacctaggcctgaaaggtgccaagccacaggggcacattggggtggatgcctctgctccccaaattgggggtagcatcactggccccagtgtggaagttcaggcccctgacattgatgttcaggggcctgggagcaaactgaatgtgcccaagatgaaagtccccaagttctctgtatcaggtgcaaagggagaggaaactgggattgatgtgacactgcctacaggtgaagtgactgttcctggggtctctggggatgtcagcctgcctgagattgctactggtgggctggaaggaaagatgaaaggtactaaagtgaagactcctgaaatgattattcagaaacctaaaatctccatgcaggatgtggatctgagccttgggtctcctaaactgaaaggagatattaaggtttctgctcctggggtgcaaggtgatgttaaaggccctcaagtggcacttaaaggctccagagtggacatagagacaccaaacctagagggaaccttgacaggccctaggcttggcagtccttccgggaaaaccggaacctgtaggatctctatgtcagaagtagacttaaatgtggccgcacctaaagtgaaagggggtgtagatgtcacactccccagagtagaagggaaagtcaaagtccctgaagttgatgtcagaggccccaaagtggatgtcagtgccccagatgtcgaagcgcatggcccagaatggaacctgaaaatgcccaagatgaaaatgcccacgttcagcactccaggagccaaaggggaaggtccagatgttcatatgactctacccaaaggagatatcagtatttcagggcccaaggtcaatgtggaagccccagatgtcaacttggagggtctggggggaaaacttaaaggccccgatgttaagctgcctgatatgagtgtcaagacaccaaagatctccatgcctgatgtagatttgcacgtgaaaggtacaaaggtgaagggagagtatgatgtaactgtaccaaagctggaaggagaactcaaaggcccaaaagtggacattgatgccccagatgtggatgttcatggcccagactggcacttgaagatgcccaagatgaaaatgcccaaattcagtgtgccagggttcaaagcagagggcccagaagtggatgtgaacctgcccaaggctgatgtggacatttccgggcccaagatagatgttactgctcctgatgtgagcattgaggaaccagaagggaaattgaaagggcccaagtttaagatgcctgagatgaacatcaaagtccccaagatctccatgcctgatgtggacttacatctgaaaggccctaacgtaaagggagaatatgatgtcacaatgccaaaggttgaaagtgagattaaagttcctgatgttgaacttaaaagtgccaaaatggacattgatgtcccagatgtggaggttcaaggcccagactggcacctgaagatgcccaagatgaaaatgcccaagttcagcatgcctggcttcaaagcagagggcccagaagtggatgtgaacctgcccaaggctgatgtggacatctcaggacccaaggtgggtgttgaagttccagatgtgaatattgaaggacctgaaggaaagctgaagggccccaagttcaagatgccagagatgaatatcaaggcccccaagatctccatgcctgatgtggacttgcatatgaaaggtcctaaagtaaagggagaatatgatatgacagtgccaaagctggaaggggacctgaaaggcccaaaagtagatgtcagtgccccagatgttgaaatgcagggtcctgactggaacttgaagatgccaaagattaaaatgcccaaatttagcatgcccagcctcaaaggagaggggccagaatttgatgtgaacctgtccaaagcgaatgtggacatttctgcaccaaaagtagatactaatgctccagatctgagccttgaaggacctgaagggaagttgaaaggcccgaagtttaagatgcctgagatgcacttcagagctcctaagatgtctttgccagatgttgacctggatcttaaaggacccaaaatgaaaggaaatgtagatatctctgcaccaaagatagagggtgaaatgcaggttccagatgtggacatcagaggtcccaaggtagatattaaagcaccagatgtggaaggccaaggcctggactggagcctgaaaatacccaagatgaaaatgcccaagttcagcatgcccagcctcaaaggcgagggcccagaagtggatgtgaacttgcctaaggctgacgttgttgtctcaggacccaaggtggacatcgaagccccagatgtgagcctcgaaggtccagaagggaagctgaagggtcccaagtttaagatgcctgagatgcatttcaagacccccaagatctccatgcctgatgtggacttacacttgaaaggccccaaagtcaaaggggatgtggatgtgtctgtgcccaaggtagaaggtgaaatgaaagtgccagatgttgaaatcaaaggacccaaaatggacattgatgccccagatgtggaggttcaaggcccagactggcacctgaagatgcccaagatgaaaatgcccaagtttagcatgcctggcttcaaaggagagggccgagaagtggatgtgaacctgcccaaggctgacattgatgtctcaggacccaaggtggatgttgaagtcccagatgtgagccttgagggcccggaaggaaagctgaagggccccaagtttaagatgcctgagatgcacttcaaggcccccaagatctccatgcctgatgtggacctgaatcttaaggggccaaaattgaagggagatgtggatgtgtccttgcctgaggtagaaggtgaaatgaaagtgccagatgttgacattaaagggcccaaagttgacattagtgctccagatgtggatgttcatggcccagattggcacctgaagatgcccaaggtgaaaatgcccaagttcagcatgcccggcttcaaaggagagggccctgaagtggatgtgaagctgcccaaagctgacgttgatgtctcaggacccaaaatggatgctgaagttccagatgtgaatattgaaggtccagacgcaaaactaaaaggtcccaaattcaagatgccagaaatgagtataaagcctcagaagatatccataccagatgttggtttgcatttgaaaggtcctaaaatgaaaggagattatgatgtaacagttccaaaagtagaaggagagataaaagctcctgatgttgacatcaaaggccccaaagttgatattaatgcaccagatgtggaggttcatggcccagactggcacctgaagatgcccaaggtaaaaatgcccaagttcagcatgcctggctttaaaggagagggcccagaggtggatatgaacctgcccaaggctgaccttggtgtttcaggacccaaggtggacattgatgttccagatgtgaatcttgaagctccagaggggaaactaaaaggccctaagttcaagatgccaagcatgaatatacagacgcacaaaatctctatgcctgatgttggacttaatttgaaagcccctaaactgaaaactgatgtagatgtttcccttcccaaagtggaaggagacttgaagggtcctgaaattgatgtgaaagcccctaagatggatgtgaatgttggtgatattgatattgaaggtccagaagggaagttgaagggccccaagtttaagatgcctgagatgcatttcaaggcccccaagatctccatgcccgatgtggacttacacttgaaaggccccaaagtcaaaggggatatggatgtgtctgtgcccaaggtagaaggtgaaatgaaagtgccagatgttgacattaaagggcccaaagtggacattgatgccccagatgtggaggttcacgacccagattggcacctgaaaatgcccaagatgaaaatgcccaagttcagtatgcctggcttcaaagcagagggccctgaagtggatgtgaatctgccaaaggctgacattgatgtgtctggacccagtgtggacactgatgctcctgatttggatattgagggaccagaaggaaagttgaaaggctccaaatttaagatgcccaagttgaatataaaagctcccaaggtctccatgccagatgtggacttgaatttgaagggacccaaactgaagggagagatagatgcttctgtgccagaactggaaggtgatctcagagggccgcaagttgatgtcaaaggtccttttgtggaagcggaggtgcccgatgttgatctggagtgtcctgatgcaaagttgaaagggcccaagtttaagatgcctgagatgcacttcaaggcccccaagatctccatgcctgatgtggacttacacctgaaaggccccaaagtcaaaggggatgcggatgtgtcggtgccaaaattggagggagatttaacaggccccagtgtgggtgtggaggtgcctgatgttgagctggagtgtcctgatgcaaagttgaaaggccctaaatttaagatgccagacatgcacttcaaggcccccaagatctccatgcctgatgtggacttacacttgaaaggccccaaagtcaaaggggatgtggatgtgtcggtgccaaaattggagggagatttaacaggtcccagtgtgggtgtggaggtgcctgatgttgagctggagtgtcctgatgcaaagttgaaagggcccaagtttaagatgcctgagatgcacttcaagacccccaagatctccatgcctgatgtggacttacacctgaaaggccccaaagtcaaaggggatatggatgtgtctgtgcccaaggtagaaggtgaaatgaaagtgccagatgttgacatcaaaggacccaaaatggacattgatgccccagatgtggatgttcatggcccagactggcacctgaagatgcccaagatgaaaatgcccaagttcagcatgcctggcttcaaagcagagggcccagaagtggatgtgaacttgcccaaggctgatgttgttgtctcaggacccaaggtggatgttgaagtcccagatgtgagccttgaaggtccagaagggaagctgaagggccccaagcttaagatgcctgagatgcacttcaaggcccccaagatctccatgcctgatgtggacttacacttgaaaggccccaaagtcaaaggggatgtggatgtgtctttgccaaaattggagggagatttaacaggccccagtgtggatgtggaggtgcctgatgttgagctggagtgtcctgatgcaaagttgaaagggcccaagtttaagatgcctgagatgcacttcaagacccccaagatctccatgcctgatgtgaacttaaacttgaaaggccccaaagtcaaaggggatatggatgtgtctgttcccaaggtagaaggtgaaatgaaagtgccagatgttgacatcagagggcccaaagtggacattgatgccccagatgtggatgttcatggcccagactggcacctgaagatgcctaagatgaaaatgcccaagttcagcatgcctggcttcaaaggagagggcccagaagtggatgtgaacttgcccaaggctgacgttgatgtctcaggacccaaggtggatgttgaagtcccagatgtgagccttgaaggtccagaagggaagctgaagggccccaagtttaagatgcctgagatgcacttcaagacccccaagatctccatgcctgatgttgatttcaatttaaagggacccaaaatcaaaggagatgttgatgtttctgccccaaagctggagggagagttaaaaggtccagaattggatgtcaaaggtcccaaattagatgctgacatgccagaagtagctgtggaaggcccaaatggcaagtggaaaactcctaagttcaagatgccagatatgcactttaaagctcccaaaatctctatgccagacctcgatctacacttgaagagccccaaggcaaaaggagaggtggatgtagatgttcccaaattggaaggggaccttaaagggccacatgtggatgtcagtgggccagacattgacattgagggaccagagggcaaattgaaaggccctaagttcaagatgcctgatatgcatttcaaagcccccaatatttctatgcctgatgttgatctaaatctcaaaggacccaaaatcaagggggatgtggatgtgtctgtgcctgaggtagaaggtaaacttgaagtaccagatatgaacatcaggggccccaaagttgatgtaaatgcccccgatgtccaagctccagactggcacctgaagatgcccaagatgaaaatgcccaagttcagcatgcctggcttcaaagcagagggccctgaagtagacgtcaacttgcctaaggctgacgttgacatctcaggacccaaggtggacattgaaggccctgatgttaatattgaaggaccagagggaaagttgaaagggcctaagttaaagatgccagagatgaacatcaaagcccccaagatctccatgcctgactttgatttgcatctgaaaggtcccaaggtgaagggcgatgtggatgtttctctgcccaaagtggaaggtgacctcaagggccccgaagttgacatcaaggggcccaaagtggatattaatgccccagatgtgggtgttcaaggcccagactggcacctgaagatgcccaaggtgaaaatgccaaagttcagcatgcctggcttcaaaggagagggcccagatggggatgtgaagctgcccaaggctgacattgatgtctcaggacccaaagtggacattgaaggccctgatgttaacattgaaggaccagagggaaagttgaaagggcctaagttcaagatgccagagatgaatatcaaagcccccaagatctccatgcctgatattgacttaaacctgaaaggacccaaagtgaagggtgatgtggatgtttcccttcctaaagtggaaggtgacctcaagggcccagaagttgacatcaagggcccaaaagtggacattgacgcacctgatgttgatgttcatggcccagactggcacctaaagatgcccaagataaaaatgcccaagatcagcatgcctggcttcaaaggagaaggtccagatgtggacgtgaacctgcccaaggctgacattgatgtctcaggaccgaaagtggatgttgaatgtcccgatgtgaatatcgaaggacctgaaggaaagtggaaaagtccaaagtttaagatgccagagatgcattttaagactccaaagatatccatgccagatattgacctgaatctcacaggtccaaaaataaaaggagatgtggatgttacaggccctaaggtagagggagatctgaaaggtcctgaagttgacctcaaaggccccaaagtggacattgatgtcccagatgttaatgttcagggtccagactggcacctgaagatgcccaagatgaaaatgcccaagttcagcatgcctggcttcaaagcagagggccctgaagtggatgtgaacctgcccaaggctgacgttgatgtctcaggccccaaagtggacgttgaaggccctgatgttaacattgaaggaccagagggaaagttgaaagggcccaagttcaagatgccagagatgaatatcaaagcccccaagatccccatgcctgactttgatttgcatctgaaaggtcccaaggtgaagggcgatgtggatatttctctgcccaaagtggaaggtgacctcaagggccctgaagttgacatcaggggtccccaagtggacattgatgtcccggatgtgggcgttcaaggcccagactggcacctaaaaatgcccaaagtgaaaatgcccaaattcagcatgcctggcttcaaaggagagggcccagatgtggatgtgaacctgcccaaggctgaccttgatgtctcaggacccaaggtggacattgatgttccagatgtgaatatcgaaggcccagagggaaagttgaaaggtcccaaattcaaaatgcctgagatgaacatcaaagcccccaagatctccatgcctgacattgatcttaacctgaaaggtcccaaagtgaagggtgacatggatgtgtctctgccaaaagtggaaggtgacatgaaagttcctgacgtggatattaaaggccccaaagtggatattaatgccccagatgtggatgttcaaggcccagactggcacctgaagatgcctaaaataaaaatgcccaagatcagcatgcctggcttcaaaggagaaggtccagaagtggacgtgaacctgcccaaggctgaccttgacgtctcaggacccaaggtggacgttgatgttccagatgtgaatattgaaggtccagatgcgaaactgaagggccctaaattcaagatgccagagatgaacatcaaagctcctaaaatatcaatgcctgatttggacctcaatcttaaaggccctaaaatgaaaggagaggtggatgtttcacttgcaaatgtagaaggtgatttgaaaggacctgctcttgacataaaaggcccaaagatagatgtagatgctccagatattgacattcatggcccagatgccaaattaaaaggtccaaaactgaagatgcctgacatgcatgtaaacatgcccaagatctccatgccagaaattgacttgaatttgaaaggctcaaagcttaagggagatgttgatgtctctgggcccaagttggaaggtgacattaaagctcccagtttggatataaagggcccagaagtggacgtttccggtcctaagcttaatatcgaaggcaagtcaaagaaatctcgttttaagcttcccaaatttaatttttcgggctctaaagttcagacacctgaagtggatgtcaaaggtaaaaagccagatattgacataacaggtccaaaagttgatattaatgctcctgatgtcgaggtccaaggaaaagtgaaaggatccaagtttaaaatgcctttcctgagtatttcatctcccaaagtttctatgcctgacgtggagctaaatttgaaaagtcccaaagtcaaaggagacttagatattgcaggtcccaatttagaaggtgactttaaaggccccaaagtggatattaaggcaccagaagtcaatcttaatgcacctgatgtggatgttcatggtccagactggaatctgaaaatgcccaagatgaaaatgcccaaattcagtgtgtctggcttaaaagcagaagggccagatgtagctgtggatctaccaaaaggagacatcaacatagagggcccaagtatgaacattgagggcccagatctcaatgtggaaggtccggagggaggcttgaaaggtcccaaattcaagatgcctgacatgaatatcaaagctcccaagatctccatgcctgacattgacttaaacttgaaaggccccaaggtgaaaggtgatgtggatatttctcttcccaaacttgaaggggatctgaaagggccagaggttgatatcaaaggccctaaagtggacatcaatgccccagatgtggatgttcatggtccagactggcatctgaagatgcccaaagtgaaaatgcccaagttcagcatgcctggcttcaaaggagaaggccctgaagtcgatgttaccctccctaaagctgacattgacatttctggtcccaatgtagacgttgatgttccagacgtgaatattgaaggtccagatgcaaagctgaagggccccaagttcaagatgcctgagatgaacatcaaagcccccaagatctccatgcctgactttgacctgaacttgaagggacccaaaatgaagggtgatgtggttgtgtctttgcccaaagtggaaggtgatctaaaaggccctgaggtggacatcaagggccccaaagtggacattgacactcctgacattaacatcgaaggctcagagggtaaattcaagggacccaaatttaagataccagagatgcacctgaaggctcccaaaatatcgatgcctgacattgatttaaacctgaagggccccaaagtcaagggcgatgtggatgtttctctgcccaaaatggaaggtgacctcaagggtcctgaagttgacatcaagggccccaaagtggacattaatgctccagatgttgatgttcaaggcccagactggcacctgaagatgcccaaggtgaaaatgcccaagttcagcatgcctggcttcaaaggagagggcccagatgtggatgtgaacctgcccaaggctgaccttgatgtctcaggacccaaggtggacattgatgttccagatgtgaatatcgaaggcccagagggaaagttgaaaggtcccaaattcaagatgcctgagatgaacatcaaagcccccaagatctccatgcctgacattgatcttaacctgaaaggacccaaagtgaagggtgatatggatgtgtctctgccaaaagtggaaggtgacatgcaagttcctgacttggatattaaaggccccaaagtggatattaatgccccagatgtggatgttcgaggcccagactggcacctgaagatgcctaagataaaaatgcccaagatcagcatgcctggcttcaaaggagaaggtccagaagtggatgtgaacctgcccaaggctgaccttgacgtctcaggacccaaggtggacgttgatgttccagatgtgaatattgaaggtccagatgcgaaactgaagggccctaaattcaagatgccagagatgaacatcaaagcccccaagatctccatgcctgactttgatttgcatctgaaaggccctaaggtgaaaggagatgtggatgtttctctgcctaagatggaaggtgatctaaaggcccctgaagttgacatcaagggccccaaagtggacattgatgccccagatgtggatgttcatggcccagactggcacctgaagatgcccaaggtgaaaatgcccaaattcagcatgccaggatttaaaggagagggcccagaagtggatgttaatttgcccaaagctgacattgatgtctcaggacccaaagtggacattgacactcctgatattgatattcatggtccagaagggaaactgaagggccccaaatttaaaatgcctgacctgcacctcaaggcaccgaagatctctatgcctgaagttgacctgaatctgaaaggtccaaagatgaagggcgacgtggacgtttctctgcccaaagtggaaggcgacctcaagggccctgaagttgacatcaagggccccaaagtggacattgatgtcccagatgtggacgttcaaggcccagactggcacttaaaaatgcccaaagtgaaaatgcccaagttcagcatgcctggcttcaaaggagagggcccagatgtggatgtgaacctgcccaaggctgaccttgacgtctcaggacccaaggtggacattgatgttcctgatgtgaatatcgaaggtccagatgcgaaactaaagggccctaaattcaagatgcctgagatgaacatcaaagcccccaagatctccatgcctgactttgatttgcatctgaaaggtcccaaggtgaagggtgatgtggatgtttcccttcctaaagtggaaggtgacctcaagggcccagaagttgacatcaagggccccaaagtggacatcgatgcccctgatgtagatgttcatggcccagactggcacctgaagatgcccaaggtgaaaatgcccaaattcagcatgccaggattcaaaggagagggcccagatgtggatgttacccttcctaaggctgacattgagatttctggccccaaagtggacattgatgcccctgatgtcagtatcgaaggtccagatgcaaaactcaagggtccaaagttcaagatgccagagatgaacatcaaggcccccaaaatctccatgcctgacattgactttaacttgaagggtcccaaagtgaaaggtgatgtggatgtctctctgcccaaagtggaaggtgatctcaagggccctgaaattgacataaaaggccccagtttggacattgacacacctgatgtcaatattgaaggtccggaaggaaaattgaaggggcccaaatttaagatgcctgagatgaacatcaaagctcccaaaatctctatgcctgactttgatttgcacctgaaaggtcccaaggtgaagggtgatgtggatgtttcactacctaaggtggaaagtgatctgaaagggccagaggtagacattgaaggtcctgaagggaagctcaaaggtcccaagtttaagatgcctgatgtacatttcaaaagcccacaaatctccatgagtgacattgatttgaatttgaaaggacctaagataaaaggagatatggacatttccgttcctaaactggagggagatctgaaaggtcccaaagtggatgtcaaaggccctaaagtgggcattgacactcctgatattgacattcatggtccagaagggaaactgaagggccccaaatttaaaatgcctgacttacacctcaaggcaccgaagatctctatgcctgaagttgacctgaatctgaaaggtccaaaggtgaagggcgacatggacatttctctgcccaaagtggaaggcgacctcaagggccccgaagttgacatcagggaccccaaagtggacattgatgtcccagatgtggacgttcaaggcccagactggcacctaaaaatgcccaaagtgaaaatgcccaagttcagcatgcctggcttcaaaggagagggcccagatgtggatgtgaacctgcccaaggctgacattgatgtctcaggacccaaagtggacgttgatgttcctgatgtgaatatcgaaggtccagatgcgaaactaaagggccccaagttcaagatgcctgagatgagcatcaaagcccccaagatctccatgcctgatattgacttaaacctgaaaggacccaaagtgaagggcgatgtggatgttacccttcctaaagtggaaggtgacctcaagggcccagaagctgacatcaagggcccaaaagtggacatcaacacccctgatgtggatgttcatggcccagactggcacctgaagatgcccaaggtgaaaatgcccaaattcagcatgcctggcttcaaaggagaaggtccagatgtggatgtgagcctgcccaaggccgacatcgatgtctcgggacccaaggtggacgttgatattccagatgtgaatatcgaaggtccagacgcaaaactgaagggccccaagttcaagatgcctgaaataaatatcaaagctcccaagatctccatacctgatgttgacctggatttgaaaggacccaaagtaaaaggagattttgatgtgtctgtccctaaggttgaagggactttgaaaggcccagaagtagatcttaaaggtccacgtctggatttcgaaggccctgatgccaaactcagtggcccatctttgaagatgccatcgctggagatatctgctcctaaagtaactgctcctgatgttgatttgcatctcaaggcaccaaaaattggattttcaggtccgaagttagaaggtggtgaagtggacctcaagggacccaaagttgaagctccaagcttagatgtacacatggacagcccagatattaacatcgaagggccagatgttaaaatccccaaatttaagaaacccaagtttggatttggggcaaaaagccccaaagctgacatcaagtcaccttcactggatgtcactgttcctgaggcagagctgaaccttgagactcctgaaattagtgttggtggcaagggcaagaaaagtaagtttaaaatgcctaaaattcatatgagtggtcctaagattaaggccaaaaaacagggatttgacctgaatgttcctgggggtgaaattgatgccagcctcaaggctccggatgtagatgtcaacatcgcagggccggatgctgcactcaaagtcgacgtgaaatcgcccaaaaccaagaaaacgatgtttggaaaaatgtacttcccagatgtagagtttgacattaaatcacctaaatttaaagctgaggcccctctccctagccccaaactggagggtgaactccaggcacctgatctggaactttctttgccagcgattcacgtcgaaggtcttgacatcaaggcgaaggctcccaaggtcaagatgccagatgtggacatctcagtgccaaaaatagagggtgacctgaaaggccccaaagtgcaggcaaacttgggtgcacctgacatcaacatcgaaggcctagatgctaaagtcaaaacaccgtccttcggcatttctgcccctcaagtctccatccctgatgtgaatgtaaacttgaaaggaccaaagataaagggtgatgtccccagcgtgggactggaaggaccagatgtagatctgcaaggtccagaagcaaaaattaagttccccaagttttccatgcccaagatcggcatcccaggtgtgaaaatggagggtgggggagccgaggtccatgcccagctaccctctcttgaaggagacttgagaggaccagatgttaagctcgaagggcccgatgtttctctaaaggggccaggagtagacttgccttcagtgaacctctctatgccaaaagtctctgggcctgaccttgatctgaacttgaaaggaccaagtttgaagggagacctggatgcatctgttcccagcatgaaggtgcatgctccagggctcaacctcagtggtgtcggtggcaaaatgcaggtgggaggagacggtgtgaaagtgccagggatcgatgccacaacaaagcttaacgttggggcaccagatgtgacactgaggggaccaagcctgcagggagatctggctgtctctggtgacatcaaatgccctaaagtatccgtaggagctcctgatctaagcttggaggcatccgaaggcagcattaaacttcccaaaatgaagctgccccaatttggcatctctactccggggtccgacttgcacgtcaatgccaaggggccacaggtttctggcgaactgaaggggccaggtgtggatgtgaacctgaaagggcctcggatttcagcaccgaatgtggactttaacttggaaggaccaaaagtgaaagggagccttggggccactggtgagatcaaaggccccactgtcggaggaggtcttccaggcattggtgttcaaggcctagaaggaaacctccagatgcctggaattaagtcctctggatgtgatgtgaacctgccaggcgtgaatgtgaaactcccaactgggcagatttctgggcctgaaatcaaaggtggtctgaaaggttcagaagtaggtttccatggggctgctcctgatatcagtgtgaaggggcctgcctttaatatggcatctcctgagtcagattttggcatcaacttgaagggcccaaaaatcaaaggaggtgcggatgtttcagggggtgtcagtgccccagacatcagccttggtgaagggcatttgagtgttaaaggttccgggggtgagtggaagggaccccaagtctcctctgctctcaacttggacacatctaagtttgctgggggccttcatttctcaggaccaaaggtggaaggaggtgtgaaaggaggtcagattggactccaggctcctgggctgagtgtgtctgggcctcaaggtcacttggaaagtggatctggaaaagtaacattccctaaaatgaagatccccaaatttaccttctctggccgtgagctggttggcagagaaatgggggtggatgttcacttccctaaagcagaggccagcatccaagctggtgctggagacggcgagtgggaagagtctgaagtcaaactgaaaaagtccaagatcaaaatgcccaagtttaatttttccaaacctaaagggaaaggtggtgtcactggctcaccagaagcatcaatttctgggtccaaaggtgacctgaaaagttcaaaggccagcctgggctctctggaaggagaggcagaggccgaagcctcttcaccgaaaggcaaattctccttatttaaaagtaagaagccacggcaccgctcaaattcattcagtgatgaaagagagttctctggaccttccaccccgacggggacgctggagtttgaaggtggggaagtgtctctggaaggtgggaaagttaaagggaaacacgggaagctgaaattcggtacctttggtggattggggtcaaagagcaaaggtcattatgaggtgactgggagcgatgatgagacaggcaagttacaggggagtggggtgtccctggcctctaagaagtcccgactgtcctcctcttctagcaatgacagtgggaataaggttggcatccagcttcccgaggtggagctgtcagtttccacaaagaaagagtagcaggcctttgtatgtgtgtacatatatatatatataacaaaacatcagccttgggtggtgtgttcctatataaactccaaagggaaacacaccgactgcctcagcaatcatgcaaagaccttgcctggcccggtggcaagcgctgaaaaaccgaccgcctgtaggctcctggaactatacagataggtaaagagttccaagttcgtccagcccatgtgcaaagtcaacagtatttgccttaagatttcatatatatatatttttttgcattgactgctgagagctcctgtttactaagcaagcttttgtgtttattatcctcatttttactgaacattgttagttttggggtaatggaaacccactttttcattgtaatgactttgggggcttttgttagtaagggtgggtggggtgatgggttgcagacggaggtcaggtcttcctctttcctgagactggatctgttcaaacagcaaacgcccacagatggcccagaggtggtggtagtcagggtgtgtgggtgtttttagggttctttagtgttgtttctttcacccaggggtggtggtcccagccagtttggtgctgacggtgagaggaaattagaatctgtttgcaaattgtccaacccaccccctcaacatgaggggcttccattttctgtgttttgtaagggaactgtttccttcatgccgccatgttcctgatattagttctgatttctttttaacaaatgttatcatgattaagaaaatttccagcactttaatggccaattaactgagaatgtaagaaaattgatgctgtacaaggcaaataaagctgtttattaaccttga

SEQ ID NO: 34 - DNA, 1108 bp, Human
  AHNAK
agacccgcccgcccgagccggagttacaagagccgcctccgcgcacgggggcccggccactcggagctgctctgccgcggggactgcaccgcccgccctgccagacccgcccggaacggggctcgtcgccgccagtagccgcagcaccgcagccttgggcctcgcgccggctatggccgtgccctggggctgagccctcaggttgtgaccgagattcccgacgagagagactgaggggaagagaggaaggaggggcgggctcctggcaaggcattcgctcctgagcggaatcctgcaaagatggagaaggaggagacaacccgggagctgctgctgcccaactggcagggtagtggctcccacgggctgaccatcgcccagagggacgacggcgtctttgtgcaggaggtgacgcagaactcccctgcggcccgcactggggtggtcaaggagggggaccagattgtgggtgccaccatctactttgacaacctgcagtcgggtgaggtgacccagctgctgaacaccatggggcaccacacggtgggcctgaagctgcaccgcaagggggaccgctctcccgagcctggccagacctggacccgtgaagtcttcagctcctgcagctctgaagtggttctgaacacaccacagccatcagcactggaatgcaaagaccagaacaaacagaaggaagccagcagccaagccggggcagtttcagtctccaccccaaatgcaggactgtagaagcggccaggaagaaaaccaccccctcttaaggttgtttttgtgaccgttctttggagcattgttctaaaaatgggaaattacatattgctgtgccaagggcaacaaacacctgcagttaaaggaataccttccgcgaggcggcttttcggagcatgcatgtttatagctccagccaggccagaccgagggctgctgcataagccctgcttggtgcatttctttacttgcaaggggacagagtgtgggcttaggtttgggactagagggggctttggcaactatggtgctcaggtgattatccttcgctcgtttatccaataaacatttatcaagcatcaaaaaaaaaaaaaaaaaa

SEQ ID NO: 35 - protein, 5890 aa, Human
  AHNAK
MEKEETTRELLLPNWQGSGSHGLTIAQRDDGVFVQEVTQNSPAARTGVVKEGDQIVGATIYFDNLQSGEVTQLLNTMGHHTVGLKLHRKGDRSPEPGQTWTREVFSSCSSEVVLSGDDEEYQRIYTTKIKPRLKSEDGVEGDLGETQSRTITVTRRVTAYTVDVTGREGAKDIDISSPEFKIKIPRHELTEISNVDVETQSGKTVIRLPSGSGAASPTGSAVDIRAGAISASGPELQGAGHSKLQVTMPGIKVGGSGVNVNAKGLDLGGRGGVQVPAVDISSSLGGRAVEVQGPSLESGDHGKIKFPTMKVPKFGVSTGREGQTPKAGLRVSAPEVSVGHKGGKPGLTIQAPQLEVSVPSANIEGLEGKLKGPQITGPSLEGDLGLKGAKPQGHIGVDASAPQIGGSITGPSVEVQAPDIDVQGPGSKLNVPKMKVPKFSVSGAKGEETGIDVTLPTGEVTVPGVSGDVSLPEIATGGLEGKMKGTKVKTPEMIIQKPKISMQDVDLSLGSPKLKGDIKVSAPGVQGDVKGPQVALKGSRVDIETPNLEGTLTGPRLGSPSGKTGTCRISMSEVDLNVAAPKVKGGVDVTLPRVEGKVKVPEVDVRGPKVDVSAPDVEAHGPEWNLKMPKMKMPTFSTPGAKGEGPDVHMTLPKGDISISGPKVNVEAPDVNLEGLGGKLKGPDVKLPDMSVKTPKISMPDVDLHVKGTKVKGEYDVTVPKLEGELKGPKVDIDAPDVDVHGPDWHLKMPKMKMPKFSVPGFKAEGPEVDVNLPKADVDISGPKIDVTAPDVSIEEPEGKLKGPKFKMPEMNIKVPKISMPDVDLHLKGPNVKGEYDVTMPKVESEIKVPDVELKSAKMDIDVPDVEVQGPDWHLKMPKMKMPKFSMPGFKAEGPEVDVNLPKADVDISGPKVGVEVPDVNIEGPEGKLKGPKFKMPEMNIKAPKISMPDVDLHMKGPKVKGEYDMTVPKLEGDLKGPKVDVSAPDVEMQGPDWNLKMPKIKMPKFSMPSLKGEGPEFDVNLSKANVDISAPKVDTNAPDLSLEGPEGKLKGPKFKMPEMHFRAPKMSLPDVDLDLKGPKMKGNVDISAPKIEGEMQVPDVDIRGPKVDIKAPDVEGQGLDWSLKIPKMKMPKFSMPSLKGEGPEVDVNLPKADVVVSGPKVDIEAPDVSLEGPEGKLKGPKFKMPEMHFKTPKISMPDVDLHLKGPKVKGDVDVSVPKVEGEMKVPDVEIKGPKMDIDAPDVEVQGPDWHLKMPKMKMPKFSMPGFKGEGREVDVNLPKADIDVSGPKVDVEVPDVSLEGPEGKLKGPKFKMPEMHFKAPKISMPDVDLNLKGPKLKGDVDVSLPEVEGEMKVPDVDIKGPKVDISAPDVDVHGPDWHLKMPKVKMPKFSMPGFKGEGPEVDVKLPKADVDVSGPKMDAEVPDVNIEGPDAKLKGPKFKMPEMSIKPQKISIPDVGLHLKGPKMKGDYDVTVPKVEGEIKAPDVDIKGPKVDINAPDVEVHGPDWHLKMPKVKMPKFSMPGFKGEGPEVDMNLPKADLGVSGPKVDIDVPDVNLEAPEGKLKGPKFKMPSMNIQTHKISMPDVGLNLKAPKLKTDVDVSLPKVEGDLKGPEIDVKAPKMDVNVGDIDIEGPEGKLKGPKFKMPEMHFKAPKISMPDVDLHLKGPKVKGDMDVSVPKVEGEMKVPDVDIKGPKVDIDAPDVEVHDPDWHLKMPKMKMPKFSMPGFKAEGPEVDVNLPKADIDVSGPSVDTDAPDLDIEGPEGKLKGSKFKMPKLNIKAPKVSMPDVDLNLKGPKLKGEIDASVPELEGDLRGPQVDVKGPFVEAEVPDVDLECPDAKLKGPKFKMPEMHFKAPKISMPDVDLHLKGPKVKGDADVSVPKLEGDLTGPSVGVEVPDVELECPDAKLKGPKFKMPDMHFKAPKISMPDVDLHLKGPKVKGDVDVSVPKLEGDLTGPSVGVEVPDVELECPDAKLKGPKFKMPEMHFKTPKISMPDVDLHLKGPKVKGDMDVSVPKVEGEMKVPDVDIKGPKMDIDAPDVDVHGPDWHLKMPKMKMPKFSMPGFKAEGPEVDVNLPKADVVVSGPKVDVEVPDVSLEGPEGKLKGPKLKMPEMHFKAPKISMPDVDLHLKGPKVKGDVDVSLPKLEGDLTGPSVDVEVPDVELECPDAKLKGPKFKMPEMHFKTPKISMPDVNLNLKGPKVKGDMDVSVPKVEGEMKVPDVDIRGPKVDIDAPDVDVHGPDWHLKMPKMKMPKFSMPGFKGEGPEVDVNLPKADVDVSGPKVDVEVPDVSLEGPEGKLKGPKFKMPEMHFKTPKISMPDVDFNLKGPKIKGDVDVSAPKLEGELKGPELDVKGPKLDADMPEVAVEGPNGKWKTPKFKMPDMHFKAPKISMPDLDLHLKSPKAKGEVDVDVPKLEGDLKGPHVDVSGPDIDIEGPEGKLKGPKFKMPDMHFKAPNISMPDVDLNLKGPKIKGDVDVSVPEVEGKLEVPDMNIRGPKVDVNAPDVQAPDWHLKMPKMKMPKFSMPGFKAEGPEVDVNLPKADVDISGPKVDIEGPDVNIEGPEGKLKGPKLKMPEMNIKAPKISMPDFDLHLKGPKVKGDVDVSLPKVEGDLKGPEVDIKGPKVDINAPDVGVQGPDWHLKMPKVKMPKFSMPGFKGEGPDGDVKLPKADIDVSGPKVDIEGPDVNIEGPEGKLKGPKFKMPEMNIKAPKISMPDIDLNLKGPKVKGDVDVSLPKVEGDLKGPEVDIKGPKVDIDAPDVDVHGPDWHLKMPKIKMPKISMPGFKGEGPDVDVNLPKADIDVSGPKVDVECPDVNIEGPEGKWKSPKFKMPEMHFKTPKISMPDIDLNLTGPKIKGDVDVTGPKVEGDLKGPEVDLKGPKVDIDVPDVNVQGPDWHLKMPKMKMPKFSMPGFKAEGPEVDVNLPKADVDVSGPKVDVEGPDVNIEGPEGKLKGPKFKMPEMNIKAPKIPMPDFDLHLKGPKVKGDVDISLPKVEGDLKGPEVDIRGPQVDIDVPDVGVQGPDWHLKMPKVKMPKFSMPGFKGEGPDVDVNLPKADLDVSGPKVDIDVPDVNIEGPEGKLKGPKFKMPEMNIKAPKISMPDIDLNLKGPKVKGDMDVSLPKVEGDMKVPDVDIKGPKVDINAPDVDVQGPDWHLKMPKIKMPKISMPGFKGEGPEVDVNLPKADLDVSGPKVDVDVPDVNIEGPDAKLKGPKFKMPEMNIKAPKISMPDLDLNLKGPKMKGEVDVSLANVEGDLKGPALDIKGPKIDVDAPDIDIHGPDAKLKGPKLKMPDMHVNMPKISMPEIDLNLKGSKLKGDVDVSGPKLEGDIKAPSLDIKGPEVDVSGPKLNIEGKSKKSRFKLPKFNFSGSKVQTPEVDVKGKKPDIDITGPKVDINAPDVEVQGKVKGSKFKMPFLSISSPKVSMPDVELNLKSPKVKGDLDIAGPNLEGDFKGPKVDIKAPEVNLNAPDVDVHGPDWNLKMPKMKMPKFSVSGLKAEGPDVAVDLPKGDINIEGPSMNIEGPDLNVEGPEGGLKGPKFKMPDMNIKAPKISMPDIDLNLKGPKVKGDVDISLPKLEGDLKGPEVDIKGPKVDINAPDVDVHGPDWHLKMPKVKMPKFSMPGFKGEGPEVDVTLPKADIDISGPNVDVDVPDVNIEGPDAKLKGPKFKMPEMNIKAPKISMPDFDLNLKGPKMKGDVVVSLPKVEGDLKGPEVDIKGPKVDIDTPDINIEGSEGKFKGPKFKIPEMHLKAPKISMPDIDLNLKGPKVKGDVDVSLPKMEGDLKGPEVDIKGPKVDINAPDVDVQGPDWHLKMPKVKMPKFSMPGFKGEGPDVDVNLPKADLDVSGPKVDIDVPDVNIEGPEGKLKGPKFKMPEMNIKAPKISMPDIDLNLKGPKVKGDMDVSLPKVEGDMQVPDLDIKGPKVDINAPDVDVRGPDWHLKMPKIKMPKISMPGFKGEGPEVDVNLPKADLDVSGPKVDVDVPDVNIEGPDAKLKGPKFKMPEMNIKAPKISMPDFDLHLKGPKVKGDVDVSLPKMEGDLKAPEVDIKGPKVDIDAPDVDVHGPDWHLKMPKVKMPKFSMPGFKGEGPEVDVNLPKADIDVSGPKVDIDTPDIDIHGPEGKLKGPKFKMPDLHLKAPKISMPEVDLNLKGPKMKGDVDVSLPKVEGDLKGPEVDIKGPKVDIDVPDVDVQGPDWHLKMPKVKMPKFSMPGFKGEGPDVDVNLPKADLDVSGPKVDIDVPDVNIEGPDAKLKGPKFKMPEMNIKAPKISMPDFDLHLKGPKVKGDVDVSLPKVEGDLKGPEVDIKGPKVDIDAPDVDVHGPDWHLKMPKVKMPKFSMPGFKGEGPDVDVTLPKADIEISGPKVDIDAPDVSIEGPDAKLKGPKFKMPEMNIKAPKISMPDIDFNLKGPKVKGDVDVSLPKVEGDLKGPEIDIKGPSLDIDTPDVNIEGPEGKLKGPKFKMPEMNIKAPKISMPDFDLHLKGPKVKGDVDVSLPKVESDLKGPEVDIEGPEGKLKGPKFKMPDVHFKSPQISMSDIDLNLKGPKIKGDMDISVPKLEGDLKGPKVDVKGPKVGIDTPDIDIHGPEGKLKGPKFKMPDLHLKAPKISMPEVDLNLKGPKVKGDMDISLPKVEGDLKGPEVDIRDPKVDIDVPDVDVQGPDWHLKMPKVKMPKFSMPGFKGEGPDVDVNLPKADIDVSGPKVDVDVPDVNIEGPDAKLKGPKFKMPEMSIKAPKISMPDIDLNLKGPKVKGDVDVTLPKVEGDLKGPEADIKGPKVDINTPDVDVHGPDWHLKMPKVKMPKFSMPGFKGEGPDVDVSLPKADIDVSGPKVDVDIPDVNIEGPDAKLKGPKFKMPEINIKAPKISIPDVDLDLKGPKVKGDFDVSVPKVEGTLKGPEVDLKGPRLDFEGPDAKLSGPSLKMPSLEISAPKVTAPDVDLHLKAPKIGFSGPKLEGGEVDLKGPKVEAPSLDVHMDSPDINIEGPDVKIPKFKKPKFGFGAKSPKADIKSPSLDVTVPEAELNLETPEISVGGKGKKSKFKMPKIHMSGPKIKAKKQGFDLNVPGGEIDASLKAPDVDVNIAGPDAALKVDVKSPKTKKTMFGKMYFPDVEFDIKSPKFKAEAPLPSPKLEGELQAPDLELSLPAIHVEGLDIKAKAPKVKMPDVDISVPKIEGDLKGPKVQANLGAPDINIEGLDAKVKTPSFGISAPQVSIPDVNVNLKGPKIKGDVPSVGLEGPDVDLQGPEAKIKFPKFSMPKIGIPGVKMEGGGAEVHAQLPSLEGDLRGPDVKLEGPDVSLKGPGVDLPSVNLSMPKVSGPDLDLNLKGPSLKGDLDASVPSMKVHAPGLNLSGVGGKMQVGGDGVKVPGIDATTKLNVGAPDVTLRGPSLQGDLAVSGDIKCPKVSVGAPDLSLEASEGSIKLPKMKLPQFGISTPGSDLHVNAKGPQVSGELKGPGVDVNLKGPRISAPNVDFNLEGPKVKGSLGATGEIKGPTVGGGLPGIGVQGLEGNLQMPGIKSSGCDVNLPGVNVKLPTGQISGPEIKGGLKGSEVGFHGAAPDISVKGPAFNMASPESDFGINLKGPKIKGGADVSGGVSAPDISLGEGHLSVKGSGGEWKGPQVSSALNLDTSKFAGGLHFSGPKVEGGVKGGQIGLQAPGLSVSGPQGHLESGSGKVTFPKMKIPKFTFSGRELVGREMGVDVHFPKAEASIQAGAGDGEWEESEVKLKKSKIKMPKFNFSKPKGKGGVTGSPEASISGSKGDLKSSKASLGSLEGEAEAEASSPKGKFSLFKSKKPRHRSNSFSDEREFSGPSTPTGTLEFEGGEVSLEGGKVKGKHGKLKFGTFGGLGSKSKGHYEVTGSDDETGKLQGSGVSLASKKSRLSSSSSNDSGNKVGIQLPEVELSVSTKKE

SEQ ID NO: 36 - protein, 181 aa, Human
  PDAP1
MPKGGRKGGHKGRARQYTSPEEIDAQLQAEKQKAREEEEQKEGGDGAAGDPKKEKKSLDSDESEDEEDDYQQKRKGVEGLIDIENPNRVAQTTKKVTQLDLDGPKELSRREREEIEKQKAKERYMKMHLAGKTEQAKADLARLAIIRKQREEAARKKEEERKAKDDATLSGKRMQSLSLNK

SEQ ID NO: 37 - DNA, 2383 bp, Human
  PDAP1
actgcggccactgaagcggcggcggcggctggcccaggaggaagaagtcgagcccaagctatttccggttccggtgtcagttcgaggcgccgccgccgccgccgcagccgccggagccgcaatgcctaaaggaggaagaaagggaggccacaaaggccgggcgaggcagtatacaagccctgaggagatcgacgcgcagctgcaggctgagaagcagaaggccagggaagaagaggagcaaaaagaaggtggagatggggctgcaggtgaccccaaaaaggagaagaaatctctagactcagatgagagtgaggatgaagaagatgactaccagcaaaagcgcaaaggcgttgaagggctcatcgacatcgagaaccccaaccgggtggcacagacaaccaaaaaggtcacacaactggatctggacgggccaaaggagctttcgaggagagaacgagaagagattgagaagcagaaggcaaaagagcgttacatgaaaatgcacttggccgggaagacagagcaagccaaggctgacctggcccggctggccatcatccggaaacagcgggaggaggctgcccggaagaaggaagaggaaaggaaagcaaaagacgatgccacattgtcaggaaaacgaatgcagtcactctccctgaataagtaactgcgacccgtgggaggagatgccggggacctgggccgcgctgccaggacctctgctgtgtctcgcccaccctgtgccctggcgccgctgcaacagcccctcatggccaggagccccccatggcctggggcctcctcttcatcttggcacagaaattgtttgggggatggggggggggactgggggaggggtagctgctatctttgagacagaaagatgcaggacagcatttcatatgtaaccatttgaatgtttttgctgtttttagaattcagagcccttgctggggggtgcctgggagatggggtaagaagagctttcatttgtctggtagatagatagcatgtaagggggtggttgtcccaggaggcagctgctgacaggtttgctacacacagccccggactgtgttgcctgggtgctcattcagagaggggctatcatctgggagcctgtgcccctgggtcctcgagggtcatggcttgtccctggtcagtcctgtctgactgacctcagggcctcacctctctgcccttccctgcccggttcctactcacctggctagggccagtgcccattttcagccctacccattgatcatttcaagaaacctctgtttactgtgtggcacccaggcaaaacatgctccacaaattcaacttgtatatttggcagattaaacttgacattatcgtaatctttgttttggcaatccatcctttggcttccgtgctcgagccgtttttacccagctgggtacggtgccacgttcaggcacgtgcacccggcaaggttcagggcacatacctacctggggcatgacatctgtcaggtggcaccgagcaggatgcggggatggaccctagataccacagcctgccccctcccctcctttagccaagtcaggatcttaggcctcagcaggcagggacccttccaggccacagtaggctgaagcagcaccaggatcctggcctggcctggcctgtaggtgtcccctggtggttataattctgtaactctaggggagaaggggaatagcactagcattggatgtcgccaaggcccacattttcctgagagaagccacaaaagatgtgcaaatgcccttcagcacaggacctggtgacatgacataaactccaagacagaacctcagtttacagcacacgaaaaaaatatcttgccaacattgtaatgacaaaataaattcccgtgaagttccacaaccaggccgggcatggtggctcatgcctgtaatcccagcactttgggaggtgaggtgggtggatcatctgaggtcaggagttcaagaccagcctggccaacatggagaaactccgtctctactaaaaatacaaaaattaaccaggcttggtggtgtatgcctgtaatcccagctacttgggaggctgaggcaggagaatcgcttgatcccaggaaggcagaggtggcagtgagctgagaacgcacaactgcactccagcctgggtgacgagcaaaactccatctcaaaacaaaagttccacaaccagcctggagtgtgtagcccctttgtccaggaatttgactagtcaatcagtgacacctggtactggcagttttgggagtggcagcccaggatggacagcagtggggagggaaccatttggcataaggccgttgggcttcaggatcaattttgttggcaagcagtaaaaataagctatctaccta

SEQ ID NO: 38 - protein, 190 aa, Human
  LZIC
MASRGKTETSKLKQNLEEQLDRLMQQLQDLEECREELDTDEYEETKKETLEQLSEFNDSLKKIMSGNMTLVDELSGMQLAIQAAISQAFKTPEVIRLFAKKQPGQLRTRLAEMDRDLMVGKLERDLYTQQKVEILTALRKLGEKLTADDEAFLSANAGAILSQFEKVSTDLGSGDKILALASFEVEKTKK

SEQ ID NO: 39 - DNA, 1484 bp, Human
  LZIC
ggtggtttgaactttgagccttttgtagtcctgatgaataatttcattttcctcaagtttatgacactcggaacgtcaagaactggaggtttgtgcaatttgagaccggtcggcactgtgcagagatcagagtactaagagacagagattaaaatggcttccagaggaaagacagagacaagcaaattaaagcagaatttagaagaacagttggatagactcatgcaacaattacaagatctggaggaatgcagagaggaacttgatacagatgaatatgaagaaaccaaaaaggaaactctggagcaactaagtgaatttaatgattcactaaagaaaattatgtctggaaatatgactttggtagatgaactaagtggaatgcagctggctattcaggcagctatcagccaggcctttaaaaccccagaggtcatcagattgtttgcaaagaaacaaccaggtcagcttcggacaaggttagcagagatggatagagatctgatggtaggaaagctggaaagagacctgtacactcaacagaaagtggagatactaacagctcttaggaaacttggagagaagctgactgcagatgatgaggccttcttgtcagcaaatgcaggtgctatactcagccagtttgagaaagtctctacagaccttggctctggagacaaaattcttgctctggcaagttttgaggttgaaaaaacaaaaaaatgacatggtgcagaagcttgtaacattgatcacattcttaatgtaaatggtgtctttcttctggggttttcagttattgcaaagaaatgaagagattctggaaatgcatcaataacctaagaaaaagcgacataaaaatatacttatggcttgtgtttatgctcttcatcattgtgcgttgtgtgcggttacctgcttgagtgatcctgaacttgttgcgacagagggactcactggactctgttcgttatgatttgtctgtttaagagagaaaacaaagtggacttgatttttattaaggctgtttgtttttaagtgttgatagtgaacgaaaagatgtgaagtaatgatatttttctgcttacaacttatccccactcattggagtgaacagtgacgcaagctcaatagacttcataagtgttcatagaattttacaattctgagtgatcttagaaatcatttctgtttttacaaacaaggaaactgaggtccagaaagagcaagcgactttgcttaaagtcgcatcagagagctgagggtaagactcaggtgtcctgactcccagtttagtatcttttgaattttatttctgtaccatttaaaaaaaataattaacactatttgtgcaagtcagtgtttttgaaaattcagtgtcccaataaaaagtggactgcacactaaaaaaaaaaaaaaaaaaaaaaaaaaaaaaaaaaaaaaaaaaaaaaaaaaaaaaaaaaaaaaaaaaaaaaaaaaaaaaa

SEQ ID NO: 40 - protein, 275 aa, Human
  ZNF397
MAVESGVISTLIPQDPPEQELILVKVEDNFSWDEKFKQNGSTQSCQELFRQQFRKFCYQETPGPREALSRLQELCYQWLMPELHTKEQILELLVLEQFLSILPEELQIWVQQHNPESGEEAVTLLEDLEREFDDPGQQVPASPQGPAVPWKDLTCLRASQESTDIHLQPLKTQLKSWKPCLSPKSDCENSETATKEGISEEKSQGLPQEPSFRGIKLSRPPKASSAIRWECVSPGSFPGDIIAAEATHSTISCFAINTLPATILPSKNVNRKYFS

SEQ ID NO: 41 - DNA, 1439 bp, Human
  ZNF397
gtggcttgcagctcggggtgggtggctcatttcctggccgctcctgggcttcgcggaaagaagagattactcacactccttcgcaagcacagaaccagttgtactgagctttttgctaagctgtttcagccaagaatggctgtggaatctggagtgatttcaaccctgatacctcaggatcctccggaacaagaactaatactagtgaaagtagaagataacttttcctgggatgagaaatttaagcagaatgggagtactcaatcctgccaagaattgtttcgtcagcaattcagaaaattttgctaccaggagacacctgggccccgggaggctctgagccgactccaggaactttgctatcagtggctaatgccagagttgcacacaaaggagcagatcttagaactgctggtactggagcagttcctgagcattctgcctgaggagctgcagatctgggttcagcaacataatccagaaagcggcgaggaagctgtgaccctgttggaggatttagagagggagtttgatgacccagggcagcaggtcccagctagtccacagggaccagcagtgccatggaaggatttaacatgtctcagagcatcccaagagtcaacagacatccacctccagcccttaaagacacagctgaaatcctggaaaccatgcctttcccctaaaagtgattgtgagaacagtgaaacagcaacaaaagagggcatctcagaagaaaaatcacagggactccctcaggaaccttcatttcgaggaattaagttgtccagacctcccaaagcttcttcagctatccgttgggaatgtgtttctccaggaagttttcccggcgatatcatagctgctgaggctacacattcaacaatttcttgctttgccatcaacactttgccagccaccatcctgccatctaaaaatgtgaatagaaagtatttttcctgaagaacacatcgtcaataaatcacctgcacccaaatctccatctcaggcgctacttctggcaaggcatatcatgaggctagtgaagcacctacaagaaacttataactcaaggttgtaaaaatggcatggtgactcttacaatcatatcacagtgggcctctccaacaatttaaacctcatgacctaggtgaaagctgtgaaaggatccacattaattcttcagaggcagggctaagactttcaagactgaaaagagactagcataaggagacttaacaggaacccagtcaaggccattcatggccatgggaccacgcataaatggagaacgagtaaattttgctaagtccaaggacattggagagatagagtcactattactgatatggtgactgagtcaacaacatactgccactatgaagtaataagaaaataaaaagttaaaaaatgtaacagaaaaaaaaaaaaaaaaaaaa

SEQ ID NO: 42 - protein, 1233 aa, Human
  SMC1A
MGFLKLIEIENFKSYKGRQIIGPFQRFTAIIGPNGSGKSNLMDAISFVLGEKTSNLRVKTLRDLIHGAPVGKPAANRAFVSMVYSEEGAEDRTFARVIVGGSSEYKINNKVVQLHEYSEELEKLGILIKARNFLVFQGAVESIAMKNPKERTALFEEISRSGELAQEYDKRKKEMVKAEEDTQFNYHRKKNIAAERKEAKQEKEEADRYQRLKDEVVRAQVQLQLFKLYHNEVEIEKLNKELASKNKEIEKDKKRMDKVEDELKEKKKELGKMMREQQQIEKEIKEKDSELNQKRPQYIKAKENTSHKIKKLEAAKKSLQNAQKHYKKRKGDMDELEKEMLSVEKARQEFEERMEEESQSQGRDLTLEENQVKKYHRLKEEASKRAATLAQELEKFNRDQKADQDRLDLEERKKVETEAKIKQKLREIEENQKRIEKLEEYITTSKQSLEEQKKLEGELTEEVEMAKRRIDEINKELNQVMEQLGDARIDRQESSRQQRKAEIMESIKRLYPGSVYGRLIDLCQPTQKKYQIAVTKVLGKNMDAIIVDSEKTGRDCIQYIKEQRGEPETFLPLDYLEVKPTDEKLRELKGAKLVIDVIRYEPPHIKKALQYACGNALVCDNVEDARRIAFGGHQRHKTVALDGTLFQKSGVISGGASDLKAKARRWDEKAVDKLKEKKERLTEELKEQMKAKRKEAELRQVQSQAHGLQMRLKYSQSDLEQTKTRHLALNLQEKSKLESELANFGPRINDIKRIIQSREREMKDLKEKMNQVEDEVFEEFCREIGVRNIREFEEEKVKRQNEIAKKRLEFENQKTRLGIQLDFEKNQLKEDQDKVHMWEQTVKKDENEIEKLKKEEQRHMKIIDETMAQLQDLKNQHLAKKSEVNDKNHEMEEIRKKLGGANKEMTHLQKEVTAIETKLEQKRSDRHNLLQACKMQDIKLPLSKGTMDDISQEEGSSQGEDSVSGSQRISSIYAREALIEIDYGDLCEDLKDAQAEEEIKQEMNTLQQKLNEQQSVLQRIAAPNMKAMEKLESVRDKFQETSDEFEAARKRAKKAKQAFEQIKKERFDRFNACFESVATNIDEIYKALSRNSSAQAFLGPENPEEPYLDGINYNCVAPGKRFRPMDNLSGGEKTVAALALLFAIHSYKPAPFFVLDEIDAALDNTNIGKVANYIKEQSTCNFQAIVISLKEEFYTKAESLIGVYPEQGDCVISKVLTFDLTKYPDANPNPNEQ

SEQ ID NO: 43 - DNA, 9725 bp, Human
  SMC1A
cgcgcgggctacctcagttctcgggcgtacggcgcggcctgtcctactgccgccggcgccgcggccgtcatggggttcctgaaactgattgagattgagaactttaagtcgtacaagggtcgacagattatcggaccatttcagaggttcaccgccatcattggacccaatggctctggtaagtcaaatctcatggatgccatcagctttgtgctaggtgaaaaaaccagcaacctgcgggtaaagaccctgcgggacctgatccatggagctcctgtgggcaagccagctgccaaccgggcctttgtcagcatggtctactctgaggagggtgctgaggaccgtacctttgcccgtgtcattgtaggaggttcttctgagtacaagatcaacaacaaagtggtccaactacatgagtacagtgaggaattagagaagttgggcattctcatcaaagctcgtaacttcctcgttttccagggtgctgtggaatctattgccatgaagaaccccaaagagaggacagctctatttgaagagattagtcgttctggggagctggcgcaggagtatgacaagcgaaagaaggaaatggtgaaggctgaagaggacacacagtttaattaccatcgcaagaaaaatattgcggctgaacgcaaggaagcaaagcaggagaaagaagaggctgaccggtaccagcgcctgaaggatgaggtagtacgggctcaggtacagctgcagctctttaagctttaccataatgaagtggaaattgagaagctcaacaaggaactggcctcaaagaacaaggagatcgagaaggacaagaagcgtatggacaaggtggaggatgaactgaaggagaagaagaaggagctgggcaaaatgatgcgggagcagcagcagattgagaaggagatcaaggagaaggactcagaattgaaccagaagcggcctcagtacatcaaagccaaggagaacacctcccacaaaatcaagaagctggaagcagccaagaagtctctgcagaatgctcagaagcactacaagaagcgtaaaggtgacatggatgagctggagaaggagatgctgtcagtggagaaggctcggcaggagtttgaagaacggatggaagaagagagtcagagtcagggcagagatttgacgttggaggagaatcaggtgaagaaataccaccggttgaaagaagaagccagcaagagagcagctaccctggcccaggagctggagaaattcaatcgagaccagaaagctgaccaggaccgtctggatctggaagaacggaagaaagtagagacagaggccaagatcaagcaaaagctgcgggaaattgaagagaatcagaagcggattgagaaactggaggaatacatcaccactagcaagcagtccctagaagagcagaagaagctagagggggagctgacagaggaggtggagatggccaagcggcgtattgatgaaatcaataaggagctgaaccaggtgatggagcagctaggggatgcccgcatcgaccgccaggagagcagccgccagcagcgaaaggcagagataatggaaagcatcaagcgcctttaccctggctctgtgtacggccgcctcattgacctatgccagcccacacaaaagaagtatcagattgctgtaaccaaggttttgggcaagaacatggatgccattattgtggactcggagaagacaggccgggactgtattcagtatatcaaggagcagcgtggggagcctgagaccttcttgcctcttgactacctggaggtgaagcctacagatgagaaactccgggagctgaagggggccaagctagtgattgatgtgattcgctatgagccacctcatatcaaaaaggccctgcagtatgcttgtggcaatgcccttgtctgtgacaacgtggaagatgcccgccgcattgcctttggaggccaccagcgccacaagacagtggcactggatggaaccctattccagaagtcaggagtgatctctggtggggccagtgacctgaaggccaaggcacggcgctgggatgagaaagcagtagacaagttgaaagagaagaaggagcgcttgacagaggagctgaaagagcagatgaaggcaaaacggaaagaggcagagctgcgtcaggtgcagtctcaggcccatggactgcagatgcggctcaagtactcccagagtgacctagaacagaccaagacacgacatctagccctgaatctgcaggaaaaatccaagctggagagtgagctagccaactttgggcctcgcattaatgatatcaagaggatcattcagagccgagagagggaaatgaaagacttgaaggagaagatgaaccaggtagaggatgaggtgtttgaagagttttgtcgggagattggtgtgcgcaacatccgggagtttgaggaagaaaaggtgaaacggcagaatgaaatcgccaagaagcgtttggagtttgagaatcagaagactcgcttgggcattcagttggattttgaaaagaaccaactgaaggaggaccaagataaagtacacatgtgggagcagacagtgaaaaaagatgaaaatgagatagaaaagctcaaaaaggaggaacaaagacacatgaagatcatagatgagaccatggctcagctacaagacctgaagaatcagcatctggccaagaagtcggaagtgaatgacaagaatcatgagatggaggagattcgtaagaaactcgggggcgccaacaaggaaatgacccatttacagaaggaggtgacagccattgagaccaagcttgaacagaagcgcagtgaccgtcacaacttgctacaggcctgtaagatgcaggacattaagttgccactgtcaaaaggcaccatggatgatattagtcaggaagagggtagctcccagggggaggactcagtgagtggttcacagagaatttccagtatctatgcacgagaggccctcattgagattgactacggtgatctgtgtgaggatctgaaggatgcccaggctgaggaagagatcaagcaagagatgaacacactgcagcagaagctgaatgagcagcagagtgtgcttcagcgtattgccgcccccaacatgaaggccatggaaaagctggaaagtgtccgagacaagttccaggagacctcagatgagtttgaagcagcccgaaagcgagcaaagaaggccaagcaggcattcgaacagatcaagaaggagcgctttgaccgcttcaatgcttgttttgaatctgtggctaccaacattgatgagatctataaggccctgtcccgcaatagcagtgcccaggcattcctgggccctgagaaccctgaagagccctacttggatggcatcaactacaactgtgtggctcctgggaaacgcttccggcctatggacaacttgtcaggcggggagaagacagtggcagctctggccctgctctttgccatccacagctacaagccagcccccttcttcgtcctggatgagattgatgctgccttggataacaccaacattggcaaggtggcaaattacatcaaggagcagtcgacttgcaacttccaggccatcgtcatctctctcaaggaggagttctacaccaaggccgagagcctcattggagtctatcctgagcaaggggactgtgtgatcagcaaagtcctgaccttcgacctcaccaagtacccagatgccaaccccaaccccaatgagcagtagcagtatttttgccctcccgccctgtctggatccctaagctgtccctctcccaatctctggatatttgactcccaaccttccccctacctcctggccctttttggtgtagtcatgggatttaggcactgctaatcaagcatgaagaggaacagaggtgatgttaggtctggagcaaaaattcctgaacgacagggagtattctggcctctgaaaggaggtgctgagctgaacagggccatctgttcatcacacacacccccttcctccccctcatcacccataatcgtgggccccttgggcctcttgcccactgtgtgtgtgggtatgtatgtgtgtatgtatgtatccgcatgtgtgcatgtgagtatgtttgcaaaataataaaggatattggagacctgttttagaaggagcctaggctgaatttgattccaagagagcttaggatgacagcacccctgagctgggcaaaggtactcaggacctcataggagtcttaggcagttacctgaaactgccttcattcactcatttgtgtattcattcatttatgtattcatcagacacataccgaacaccctctatttgtcaggctctgtgcttggaatacagagttgaatcagacatgatctctaccctcctagtaaggagatacagtgggttcatgaatgactatagttagctgaatgtcatatgtactttgaatttgagaagtgggtgatcccctctaggcttcctggaggtcacatttaagctagaccttgacaaattggtaggatttggtcaggcactaggagtggagcatgagctctggggacagacagttatgggttctggtcccactttttatcacttactagttgtttgaccttgggcaagtcatttgaccttctgtgcctcagtttcctcatctgtaaaatggggctaacaatattacctacctcataggatttaatgatgtcaagctcctcactggaggccttatcccttcgtggagcccactaggtgccgacccctcagaatataaccctcatgcctggacccctgagagcttctgatcccagctattagggacagaagaagcctccaaatctggaaggtgctgaatgccctgctgactgggaaagtttcagggcactgatggggtctacctggtaagcggagggcctgaggaaacctgtagcttcaatcatgtctggtaaccgggtgcctgagccccaatctgggttgtgaggaaataggggagaggtatcctgggccacatcccagcctaacacctgtgaggttcattttaggaactaacctcattagctataaggatcatgcagaggcagcaaagccgggtgcgatgagctcagcctttactcattcacatacaccatcacactttaattccaatctgtatattgctttttaaaagttaagtccattctaattacccaaatatgcatgaattcattctccttttgagaagttagattgttaaagatagtctcattcagctaccaaccactccttgatccttcccttcttagtggctgttgtttgttgtacttccgtttagactttgttttaatgcttgtacgtacatatgtgaactcattggaaatattgtgtgtttaatgcaaatgatatattgaattgtttagcaatttgttttctttgcttaacgatgtttttgagatctgtgcatgttacttaatgtagctcaatccatcttctgtaattgctgtatagattgtcatcatatgattaccacattttacttacgcatttcttttgtgatggacattaagactgtttttaggttttgctattacaaaatactacacaggagcatcactatgcctgtgtgaaagtatatgtatgaaagtttacctagggttgattcctagaagtggaattgcaaagtcataggatatttatatattggtttttaataatacttccaaattgccctcctgtactatttactcagtatttttcttgaggttgatctgaggtctaacattgttatcctatatcattttcatcccaagtagtgatatctgtgaaatcacaggtttgatgtgtgctaattatgtattcttctaatacatattaaaagacataactatcaaaacaaaataaatttgtctgttttcaaccaaagaagtcacgtaccactggtggtactgtgtgccataatttggcaaatgctggcctttatggacgagcacaattcgggggtcagacctggttcaaattctagctgtagaaacttgtgcaagttacttcacctctgagcctaagtttccacatctgtaaaaggagataataaacacctaccttgcagtagtgaagcaaagagaaaattaaatatatatgaagcaatttggctggcatctagatcattcacagccctttaaaggtcacctttgctgttctccccactttacagataaggaaactgaggcccaaaaaggtttgaacccaggtcttccaagtcattcaagtgctttctccactgtacaggtggttatcaaccttggctgcgcatcagaatcgtttgtaaagctttttctttttcctttttaaaaagtaaagcaatatatacacaggtaaaaaaataaaatagtacagaagggcttataatgagaagcagcagttccctgcttgcacccccacatccaaaggatgtggagctctttaaaaataaattgctctggtcccacctctggaaatctgattcagccagcatggataataacccagataactaacccctacctcacaggataaaaaggattacatgagatgccttaggctaaggccctggcacacaggaacacatgtgctacaaaggagctttggggacttaagtcctgaggatccaggaggtgaggtgacttgtccaagattccactggtttagtggcagagcctagacttccactcggatctatttagtgcttgccccctgctctctcctgtcgtgccccaccacctcctggcatcacagggcaaccgttgtcaaggctatgctcacgggaggctgggcaccacagtgtttccaagagcaagctggatccgagtagattccctagggcttgttggaggaactagtttgactcccttatactgtggacgcagtagccttgctgtagggagttgaagagtactccacaacagtatcttaagtttaactgggcacttccctctggaaatcacagtgttgtgcaccaggaacacaaagatgagtcaaatctttatcctgcctttgaggagctcactgtttagttggggaaaccatttgtaaaacagccattaaccatacagtgtgatcaacactgacaggagcacaggaaaaacatctagcttatgtgaagattcagagaaggcatcctgtagtctaggtggtgatacctgaactgagtcttgagggacgggtaggaattagccagttgaggaagtagaaggaatttccagatattggaaacagtatgcatgaagacatgaaggcaagaaacagcaaaacaaatactgaagcatgaagattcctggggtggggggaaagcagcaagaaaaggtagagaggaaccagattggaagagggtcgtaaatgcatggctacagaattcagatttgttttgtaggacagtgtggttcccaaactggctgtataccacaaacaggtacggcattctgggccccggcccctaaaacattcattaagtctggggtgaagatttggaatcttgaatgcttataaaggttaccacatgactagggtacagccagatttggaaaccatagcttgaaggcagtgagggagccatgaaatggtttttaatagggggactccagatcagatgtgaacttaacctgtttctggctggctagccaaccagcatggaaaacagattaggttagatgttcatgctgtatgtgcccgtgcctgtagcttccctgttaatcagcttcttacactactatatttgcttattttgtctctgaataagctttaggcaccacaagggtgggcctggggatattttgcttaccagtatagcccctgcaaaaaagcacagtgcctgacacaaaacaggcacccagtaaagtttttgaatgaatgaatgcatgagtgaatccatttgtgagagagcgaatggagatgacaagattagctaggagactggaaaaagaccaggaggcctgcactagggcaaaggccagtaggaatagattggaggtgttaaggtgtgaactgttaaggtaagatgataacttaatgactgattattggatgtggagggtgactgagaggatagaatgagtacccatgaatagccatgattcctaccctgtcccagtcatctctttccttatccatctctgaaacaatctgcttacatcctcctcagcaactggaattcctcaagttagttagacattctgtgtgctgtgtggtctctcactgcccccccactccccacccctccacaagccattgattcattcatccagttcaataaatcttggctaagcacctccagtgtgcagtaaggctcttccaagccaggactctgactccctctttcctacctcaagagatgtttttgagggctttcccaggtaagagtcacatctcttatacaataacttatagtgagatacccagaatgtcagacttgtaagggaagactgcccaaaccccttctgaggtcctcagaggggaattaacttcctaaggtccgactgctaggaagtgttggagccagaaatggaacctaggtttcctttctatgtcatctctggagtcttgatcttgatctatcccattgtagatcaggacaggcagaggtggtcagggagaaggtgggacttaggttgaaccttgaaggtcaatgtattggacaggtcaaacaagatggttgccaattacactgcccccttctggaaacccttagcaaacctgccatgcttgcagtcccttctaaggggtttccttagcataagttgccatgctctgtaccatgtgacctcacaatcctggccacagatagctagatgtggatagtgtctggttcaagggcaaccaatctctaggctggccagtggcctgttagctggactggcataaggacttcaccttacaggggtggcatgtatcaaatggcaaatgtatgaaacaaccagatctttcagggaggcagaatgtgagctattcagaagaagtgaacgttaattagaatttaatgaggcattagtggtggtggatgaggggtggccagaaactaaacagcaaaagcaaagagaaagctgcagaaaccataagtaagcagaggtcatgagacatttgtataatgagatcacggagccacagggtggcagaagccatgaagcagcaaggcaacaatgggctagaagccatgaagcaataggagccacgaggaacagaaaccgtgagacaaaactgactatgagatccacaaagcagcagaaggcttgaatagataagatcatgagacagtagaagcgatgagactgcaagaaccacaaggtagccagaaccatgtggcaacatggcaacaggaatggaagaggcagcaggagctacaatgcagaaaagccatggattaataggaactgaagcgccgggagccatgaagctgcaggacccatgaggcagaaaaagccatgggctagcatcgaggggggcagaaagaagttagtcagtagcagtaggaggagtataaatacagccagaaaggagttgagtcaccaatttgggaagcactagagaagggagcaacagatgcctgcagctgagggggtgacaagataagccaggctctagagctgctttggatcatgaaccattttcaagtttctgttcttccatgaggctgcctgtgtagctgttcttgtcttccttatttccctgtgaatgctttaataaatccccatcactaa

SEQ ID NO: 44 - protein, 2054 aa, Human
  MYO18A
MFNLMKKDKDKDGGRKEKKEKKEKKERMSAAELRSLEEMSLRRGFFNLNRSSKRESKTRLEISNPIPIKVASGSDLHLTDIDSDSNRGSVILDSGHLSTASSSDDLKGEEGSFRGSVLQRAAKFGSLAKQNSQMIVKRFSFSQRSRDESASETSTPSEHSAAPSPQVEVRTLEGQLVQHPGPGIPRPGHRSRAPELVTKKFPVDLRLPPVVPLPPPTLRELELQRRPTGDFGFSLRRTTMLDRGPEGQACRRVVHFAEPGAGTKDLALGLVPGDRLVEINGHNVESKSRDEIVEMIRQSGDSVRLKVQPIPELSELSRSWLRSGEGPRREPSDAKTEEQIAAEEAWNETEKVWLVHRDGFSLASQLKSEELNLPEGKVRVKLDHDGAILDVDEDDVEKANAPSCDRLEDLASLVYLNESSVLHTLRQRYGASLLHTYAGPSLLVLGPRGAPAVYSEKVMHMFKGCRREDMAPHIYAVAQTAYRAMLMSRQDQSIILLGSSGSGKTTSCQHLVQYLATIAGISGNKVFSVEKWQALYTLLEAFGNSPTIINGNATRFSQILSLDFDQAGQVASASIQTMLLEKLRVARRPASEATFNVFYYLLACGDGTLRTELHLNHLAENNVFGIVPLAKPEEKQKAAQQFSKLQAAMKVLGISPDEQKACWFILAAIYHLGAAGATKEAAEAGRKQFARHEWAQKAAYLLGCSLEELSSAIFKHQHKGGTLQRSTSFRQGPEESGLGDGTGPKLSALECLEGMAAGLYSELFTLLVSLVNRALKSSQHSLCSMMIVDTPGFQNPEQGGSARGASFEELCHNYTQDRLQRLFHERTFVQELERYKEENIELAFDDLEPPTDDSVAAVDQASHQSLVRSLARTDEARGLLWLLEEEALVPGASEDTLLERLFSYYGPQEGDKKGQSPLLHSSKPHHFLLGHSHGTNWVEYNVTGWLNYTKQNPATQNAPRLLQDSQKKIISNLFLGRAGSATVLSGSIAGLEGGSQLALRRATSMRKTFTTGMAAVKKKSLCIQMKLQVDALIDTIKKSKLHFVHCFLPVAEGWAGEPRSASSRRVSSSSELDLPSGDHCEAGLLQLDVPLLRTQLRGSRLLDAMRMYRQGYPDHMVFSEFRRRFDVLAPHLTKKHGRNYIVVDERRAVEELLECLDLEKSSCCMGLSRVFFRAGTLARLEEQRDEQTSRNLTLFQAACRGYLARQHFKKRKIQDLAIRCVQKNIKKNKGVKDWPWWKLFTTVRPLIEVQLSEEQIRNKDEEIQQLRSKLEKAEKERNELRLNSDRLESRISELTSELTDERNTGESASQLLDAETAERLRAEKEMKELQTQYDALKKQMEVMEMEVMEARLIRAAEINGEVDDDDAGGEWRLKYERAVREVDFTKKRLQQEFEDKLEVEQQNKRQLERRLGDLQADSEESQRALQQLKKKCQRLTAELQDTKLHLEGQQVRNHELEKKQRRFDSELSQAHEEAQREKLQREKLQREKDMLLAEAFSLKQQLEEKDMDIAGFTQKVVSLEAELQDISSQESKDEASLAKVKKQLRDLEAKVKDQEEELDEQAGTIQMLEQAKLRLEMEMERMRQTHSKEMESRDEEVEEARQSCQKKLKQMEVQLEEEYEDKQKVLREKRELEGKLATLSDQVNRRDFESEKRLRKDLKRTKALLADAQLMLDHLKNSAPSKREIAQLKNQLEESEFTCAAAVKARKAMEVEIEDLHLQIDDIAKAKTALEEQLSRLQREKNEIQNRLEEDQEDMNELMKKHKAAVAQASRDLAQINDLQAQLEEANKEKQELQEKLQALQSQVEFLEQSMVDKSLVSRQEAKIRELETRLEFERTQVKRLESLASRLKENMEKLTEERDQRIAAENREKEQNKRLQRQLRDTKEEMGELARKEAEASRKKHELEMDLESLEAANQSLQADLKLAFKRIGDLQAAIEDEMESDENEDLINSLQDMVTKYQKRKNKLEGDSDVDSELEDRVDGVKSWLSKNKGPSKAASDDGSLKSSSPTSYWKSLAPDRSDDEHDPLDNTSRPRYSHSYLSDSDTEAKLTETNA

SEQ ID NO: 45 - protein, 2039 aa, Human
  MYO18A
MFNLMKKDKDKDGGRKEKKEKKEKKERMSAAELRSLEEMSLRRGFFNLNRSSKRESKTRLEISNPIPIKVASGSDLHLTDIDSDSNRGSVILDSGHLSTASSSDDLKGEEGSFRGSVLQRAAKFGSLAKQNSQMIVKRFSFSQRSRDESASETSTPSEHSAAPSPQVEVRTLEGQLVQHPGPGIPRPGHRSRAPELVTKKFPVDLRLPPVVPLPPPTLRELELQRRPTGDFGFSLRRTTMLDRGPEGQACRRVVHFAEPGAGTKDLALGLVPGDRLVEINGHNVESKSRDEIVEMIRQSGDSVRLKVQPIPELSELSRSWLRSGEGPRREPSDAKTEEQIAAEEAWNETEKVWLVHRDGFSLASQLKSEELNLPEGKVRVKLDHDGAILDVDEDDVEKANAPSCDRLEDLASLVYLNESSVLHTLRQRYGASLLHTYAGPSLLVLGPRGAPAVYSEKVMHMFKGCRREDMAPHIYAVAQTAYRAMLMSRQDQSIILLGSSGSGKTTSCQHLVQYLATIAGISGNKVFSVEKWQALYTLLEAFGNSPTIINGNATRFSQILSLDFDQAGQVASASIQTMLLEKLRVARRPASEATFNVFYYLLACGDGTLRTELHLNHLAENNVFGIVPLAKPEEKQKAAQQFSKLQAAMKVLGISPDEQKACWFILAAIYHLGAAGATKEAAEAGRKQFARHEWAQKAAYLLGCSLEELSSAIFKHQHKGGTLQRSTSFRQGPEESGLGDGTGPKLSALECLEGMAAGLYSELFTLLVSLVNRALKSSQHSLCSMMIVDTPGFQNPEQGGSARGASFEELCHNYTQDRLQRLFHERTFVQELERYKEENIELAFDDLEPPTDDSVAAVDQASHQSLVRSLARTDEARGLLWLLEEEALVPGASEDTLLERLFSYYGPQEGDKKGQSPLLHSSKPHHFLLGHSHGTNWVEYNVTGWLNYTKQNPATQNAPRLLQDSQKKIISNLFLGRAGSATVLSGSIAGLEGGSQLALRRATSMRKTFTTGMAAVKKKSLCIQMKLQVDALIDTIKKSKLHFVHCFLPVAEGWAGEPRSASSRRVSSSSELDLPSGDHCEAGLLQLDVPLLRTQLRGSRLLDAMRMYRQGYPDHMVFSEFRRRFDVLAPHLTKKHGRNYIVVDERRAVEELLECLDLEKSSCCMGLSRVFFRAGTLARLEEQRDEQTSRNLTLFQAACRGYLARQHFKKRKIQDLAIRCVQKNIKKNKGVKDWPWWKLFTTVRPLIEVQLSEEQIRNKDEEIQQLRSKLEKAEKERNELRLNSDRLESRISELTSELTDERNTGESASQLLDAETAERLRAEKEMKELQTQYDALKKQMEVMEMEVMEARLIRAAEINGEVDDDDAGGEWRLKYERAVREVDFTKKRLQQEFEDKLEVEQQNKRQLERRLGDLQADSEESQRALQQLKKKCQRLTAELQDTKLHLEGQQVRNHELEKKQRRFDSELSQAHEEAQREKLQREKLQREKDMLLAEAFSLKQQLEEKDMDIAGFTQKVVSLEAELQDISSQESKDEASLAKVKKQLRDLEAKVKDQEEELDEQAGTIQMLEQAKLRLEMEMERMRQTHSKEMESRDEEVEEARQSCQKKLKQMEVQLEEEYEDKQKVLREKRELEGKLATLSDQVNRRDFESEKRLRKDLKRTKALLADAQLMLDHLKNSAPSKREIAQLKNQLEESEFTCAAAVKARKAMEVEIEDLHLQIDDIAKAKTALEEQLSRLQREKNEIQNRLEEDQEDMNELMKKHKAAVAQASRDLAQINDLQAQLEEANKEKQELQEKLQALQSQVEFLEQSMVDKSLVSRQEAKIRELETRLEFERTQVKRLESLASRLKENMEKLTEERDQRIAAENREKEQNKRLQRQLRDTKEEMGELARKEAEASRKKHELEMDLESLEAANQSLQADLKLAFKRIGDLQAAIEDEMESDENEDLINSEGDSDVDSELEDRVDGVKSWLSKNKGPSKAASDDGSLKSSSPTSYWKSLAPDRSDDEHDPLDNTSRPRYSHSYLSDSDTEAKLTETNA

SEQ ID NO: 46 - DNA, 7591 bp, Human
  MYO18A
tccatccctgaccgggccgaggctgctggatgccgcgtctccgcttctgctgcctgccgggcgggctccggtggccgcagcaaagtggggcaccaaggccctgtgctaagcactcataatcctctgggggtgctacccctacaaacagcacccccaccatgtttaacctaatgaagaaagacaaggacaaagatggcgggcggaaggagaagaaggagaaaaaggagaaaaaggagcggatgtcagcggcagagcttcggagcctggaggagatgagcctgcgacgtggcttcttcaacctgaaccgctcctccaagcgtgaatccaagacgcgcctggaaatctccaaccccatccccatcaaggtggccagcggctctgacctgcacctgactgacattgactccgatagtaaccggggcagcgtcatcctggactcgggccacctaagtacagccagctccagcgatgacctcaagggtgaggagggtagcttccgtggctcggtgctgcagcgggcagccaagttcggctcactggccaagcagaactcacagatgattgtcaagcgcttttccttctcccagcgtagccgggatgagagcgcctcagaaacctcgacgccctcagagcactctgccgccccctcgccacaggtggaggtgaggactctagagggacagctggtgcagcatcctggcccaggcatccctcgaccagggcaccgatcccgagcccctgagctagtgactaaaaagttcccagtcgacctgcgcctgccccccgtggtgcccctgcccccacctaccctccgggagctggagctgcaacgacggcccactggagactttggcttctccctgcggcgcacaaccatgctggatcggggccccgagggccaggcctgtcggcgtgtggtccactttgctgagcctggtgcaggcaccaaggacctggccctggggctggtgccaggagatcgactggtggagattaatgggcacaatgtggagagcaagtccagggatgagattgtggagatgatccggcagtcaggggacagcgtgcggctcaaggtgcagcccattccagagctcagcgagctcagcaggagctggctgcggagcggcgagggacctcgcagggagccatccgatgcgaaaacagaagaacagattgcagcagaagaggcctggaatgagacggagaaggtgtggctggtccatagggacggcttctcactggccagtcaactcaaatctgaggagctcaacttgcctgaggggaaggtgcgtgtgaagctggaccacgatggggccatcctggatgtggatgaggatgacgttgagaaggctaatgctccctcctgcgaccgtctggaggatctggcctcactggtgtacctcaatgagtccagcgtcctgcacaccttgcgccagcgctatggcgctagcctgctgcacacgtatgctggccccagcctgctggttcttggcccccgtggggcccctgctgtgtactctgagaaggtgatgcacatgttcaagggttgtcggcgggaggacatggcaccccacatctatgcagtggcccagaccgcatacagggcgatgctgatgagccgtcaggatcagtcaatcatcctcctgggcagtagtggcagtggcaagaccaccagctgccagcatctggtgcagtacctggccaccatcgcgggcatcagcgggaacaaggtgttttctgtggagaagtggcaggctctgtacaccctcctggaagcctttgggaacagccccaccatcattaatggcaatgccacccgcttctcccagatcctctccctggactttgaccaagctggccaggtggcctcagcctccattcagacaatgcttctggagaagctgcgtgtggctcggcgcccagccagtgaagccacattcaacgtcttctactacctgctggcctgtggggatggcaccctcaggacagagctccacctcaaccacttggcagagaacaatgtgtttgggattgtgccactggccaagcctgaggaaaagcagaaggcagctcagcagtttagtaagctgcaggcggccatgaaggtgctgggcatctcccccgatgaacagaaggcctgctggttcattctggctgccatctaccacctgggggctgcgggagccaccaaagaagctgctgaagctgggcgcaagcagtttgcccgccatgagtgggcccagaaggctgcgtacctactgggctgcagcctggaggagctgtcctcagccatcttcaagcaccagcacaagggtggcaccctgcagcgctccacctccttccgccagggccccgaggagagtggcctgggagatgggacaggcccgaaactgagtgcactggagtgccttgagggcatggcggccggcctctacagcgagctcttcacccttctcgtctccctggtgaatagggctctcaagtccagccagcactcactctgctccatgatgattgtcgacaccccgggcttccagaaccctgagcagggtgggtcagcccgcggagcctcctttgaggagctgtgccacaactacacccaagaccggctgcagaggctcttccacgagcgcaccttcgtgcaggagttggaaagatacaaggaggagaacatcgagctggcgtttgacgacttggaacccccgacggatgactctgtggctgctgtggaccaggcctcccatcagtccctggtccgctcgctggcccgcacagacgaggcgaggggcctgctctggctattggaagaggaggctctggtgccaggggccagtgaggacaccctcctggagcgccttttctcctattatggcccccaggaaggtgacaaaaaaggccaaagcccccttctgcacagcagcaaaccacaccactttctcctgggccacagccatggcaccaactgggtagagtacaatgtgactggctggctgaactacaccaagcagaacccagccacccagaatgccccccggctcctgcaggactcccagaaaaaaatcatcagcaacctgtttctgggccgcgcaggcagtgccacggtgctctctggctccatcgcgggcctggagggcggctcgcagctggcactgcgccgggccaccagcatgcggaaaacctttaccacaggcatggcggctgtcaaaaagaagtcactgtgcatccagatgaagctacaggtggacgccctcatcgacaccatcaagaagtcaaagctgcattttgtgcactgcttcctgcctgtagctgagggctgggctggggagccccgttccgcctcctcccgccgagtcagcagcagcagtgagctggacctgccctcgggagaccactgcgaggctgggctcctgcagctcgacgtgcccctgctccgcacccagctccgcggctcccgcctgctcgatgccatgcgcatgtaccgccaaggttaccctgaccacatggtgttttccgagttccgccgccgctttgatgtcctggccccgcacctgaccaagaaacacgggcgtaactacatcgtggtggatgaaaggcgggcagtggaggagctgctggagtgcttggatctggagaagagcagctgctgcatgggcctgagccgggtgttcttccgggcgggcaccttggcacggctggaggagcagcgggatgaacaaaccagcaggaacctaaccctgttccaagcagcctgcaggggctacctggcccgccagcacttcaagaagagaaagatccaggacctggccattcgctgtgtacagaagaacatcaagaagaacaaaggggtgaaggactggccctggtggaagctttttaccacagtgaggcccctcatcgaagtacagctgtcagaggagcagatccggaacaaagacgaggagatccagcagctgcggagcaagctcgagaaggcggagaaggagaggaacgagctgcggctcaacagtgaccggctggagagccggatctcagagctgacatcggagctgacagatgagcgtaacacaggagagtccgcctcccagctgctggacgcggagacagcagagaggctccgggctgagaaggagatgaaggaactgcagacccagtacgatgcactgaagaagcagatggaggttatggaaatggaggtgatggaggcccgtctcatccgggcagcggagatcaacggggaagtggatgatgatgatgcaggtggcgagtggcggctgaagtatgagcgggctgtgcgggaggtggacttcaccaagaaacggctccagcaggagtttgaggacaagctggaggtggagcagcagaacaagaggcagctggaacggcggctcggggacctgcaggcagatagtgaggagagtcagcgggctctgcagcagctcaagaagaagtgccagcgactgacggctgagctgcaagacaccaagctgcacctggagggccagcaggtccgcaaccacgaactggagaagaagcagaggaggtttgacagtgagctctcgcaggcgcatgaggaggcccagcgggagaagctgcagcgggagaagctgcagcgggagaaggacatgctcctcgctgaggctttcagcctgaagcagcaactagaggaaaaagacatggacattgcagggttcacccagaaggttgtgtctctagaggcagagctccaggacatttcttcccaagagtccaaggatgaggcttctctggccaaggtcaagaaacagctccgggacctggaggccaaagtcaaggatcaggaagaagagctggatgagcaggcagggaccatccagatgctggaacaggccaagctgcgtctggagatggagatggagcggatgagacagacccattctaaggagatggagagtcgggatgaggaggtggaggaggcccggcagtcgtgtcagaagaagttaaaacagatggaggtgcagctagaggaagagtatgaggacaagcagaaggttctgcgagagaagcgggagctggagggcaagctcgccaccctcagcgaccaggtgaaccggcgggactttgagtcagagaagcggctgcggaaggacctgaagcgcaccaaggccctgctggcagatgcccagctcatgctggaccacctgaagaacagtgctcccagcaagcgagagattgcccagctcaagaaccagctggaggagtcagagttcacctgtgcggcagccgtgaaagcacggaaagcaatggaggtggagatcgaagacctgcacctgcagattgatgacatcgccaaagccaagacagcgctggaggagcagctgagccgccttcagcgtgagaagaatgagatccagaaccggctggaggaagatcaggaagacatgaacgaattgatgaagaagcacaaggctgccgtggctcaggcttcccgggacctggctcagataaatgatctccaagctcagctagaagaagccaacaaagagaagcaggagctgcaggagaagctacaagccctccagagccaggtggagttcctggagcagtccatggtggacaagtccctggtgagcaggcaggaagctaagatacgggagctggagacacgcctggagtttgaaaggacgcaagtgaaacggctggagagcctggctagccgtctcaaggaaaacatggagaagctgactgaggagcgggatcagcgcattgcagccgagaaccgggagaaggaacagaacaagcggctacagaggcagctccgggacaccaaggaggagatgggcgagcttgccaggaaggaggccgaggcgagccgcaagaagcacgaactggagatggatctagaaagcctggaggctgctaaccagagcctgcaggctgacctaaagttggcattcaagcgcatcggggacctgcaggctgccattgaggatgagatggagagtgatgagaatgaggacctcatcaacagtttgcaggacatggtgacaaagtatcagaaaagaaagaataaacttgagggagactctgatgtggactcggagctggaggaccgtgttgacggggtcaagtcctggttgtcaaaaaacaagggaccttccaaggcagcttctgatgatggcagcttaaagagttccagccccaccagctactggaagtcccttgcccctgatcggtcagatgatgagcacgaccctctcgacaacacctccagaccgcgatactcccacagttatctgagtgacagcgacacagaggccaagctgacggagactaacgcatagcccaggggagtggttggcagccctctcaccccagggcctgtggctgcctgggcacctctcccaggaagtggtggggcaccggtctcccccacccgactgctgatctgcatgggaaacaccctgaccttcttctgtcaggggcactttccaggctatgggtgtctgatgtctccacgtggaagaggtgggggaaagaggagtttctgaagagaactttttgctcctctgtctcaaaatgccagactcttggcttctaccctgtgtcaccgtgggcagtggcaggtggcctggcactgcatggagccagcacgttgacctccctctcagctccctgctcagggacggtggacaggttgcctactgggacactctaggttgctgggtccatggggaggattgggggaggagaagcagtgccttccctctcgtgtggggtgggggctctctcttcttggtgcctgctgtctttctactttttaatttaaatacccaacctctccatcacagctgcatccctgagagtgggagggggctgtagtggtagctggggctcccaagaacgactcgggaatgtcatctccatcttcacccttcagagagcagtcctttctctgtgcagctggagacgctggtgaggagagccgggtccaggttcttaagaatgaggtgcggaggggctctccggtgctgctgggctgggttgagcaagcctacgcagacaagtgtgtgtgtggaccatccgcacctccagcccccaccccaccctctttgtctcagcgtgttatgtgcaatgacctatttaaggtaaacccattccaactacagcagttcagggctgatccaagcactgcctccctcctgctctgtccaggtggtctggaccataaactcaacttgagagggaaggcttggggttgaggacttgtgatcagaaaaactgaagatggaagttttggccggtgctcattagacatgagtcctcactctgtgtcctgagcccgtgtcattcttccaacctccctgcccccacacacttatcccagacacaacaccatgtggtctggaggtcccagcccccaccctaaaaaggttatccctgagaactccaccagacttgggagcccaagtgcagtgcctggtgctgctcccatctgccgccccccttctctcctgcaattggtttgtactcactgggctgtgctctcccctgtttacccgatgtatggaaataaaggcccttttcctcctggctgcgccagtaaaaaaaa

SEQ ID NO: 47 - DNA, 7546 bp, Human
  MYO18A
tccatccctgaccgggccgaggctgctggatgccgcgtctccgcttctgctgcctgccgggcgggctccggtggccgcagcaaagtggggcaccaaggccctgtgctaagcactcataatcctctgggggtgctacccctacaaacagcacccccaccatgtttaacctaatgaagaaagacaaggacaaagatggcgggcggaaggagaagaaggagaaaaaggagaaaaaggagcggatgtcagcggcagagcttcggagcctggaggagatgagcctgcgacgtggcttcttcaacctgaaccgctcctccaagcgtgaatccaagacgcgcctggaaatctccaaccccatccccatcaaggtggccagcggctctgacctgcacctgactgacattgactccgatagtaaccggggcagcgtcatcctggactcgggccacctaagtacagccagctccagcgatgacctcaagggtgaggagggtagcttccgtggctcggtgctgcagcgggcagccaagttcggctcactggccaagcagaactcacagatgattgtcaagcgcttttccttctcccagcgtagccgggatgagagcgcctcagaaacctcgacgccctcagagcactctgccgccccctcgccacaggtggaggtgaggactctagagggacagctggtgcagcatcctggcccaggcatccctcgaccagggcaccgatcccgagcccctgagctagtgactaaaaagttcccagtcgacctgcgcctgccccccgtggtgcccctgcccccacctaccctccgggagctggagctgcaacgacggcccactggagactttggcttctccctgcggcgcacaaccatgctggatcggggccccgagggccaggcctgtcggcgtgtggtccactttgctgagcctggtgcaggcaccaaggacctggccctggggctggtgccaggagatcgactggtggagattaatgggcacaatgtggagagcaagtccagggatgagattgtggagatgatccggcagtcaggggacagcgtgcggctcaaggtgcagcccattccagagctcagcgagctcagcaggagctggctgcggagcggcgagggacctcgcagggagccatccgatgcgaaaacagaagaacagattgcagcagaagaggcctggaatgagacggagaaggtgtggctggtccatagggacggcttctcactggccagtcaactcaaatctgaggagctcaacttgcctgaggggaaggtgcgtgtgaagctggaccacgatggggccatcctggatgtggatgaggatgacgttgagaaggctaatgctccctcctgcgaccgtctggaggatctggcctcactggtgtacctcaatgagtccagcgtcctgcacaccttgcgccagcgctatggcgctagcctgctgcacacgtatgctggccccagcctgctggttcttggcccccgtggggcccctgctgtgtactctgagaaggtgatgcacatgttcaagggttgtcggcgggaggacatggcaccccacatctatgcagtggcccagaccgcatacagggcgatgctgatgagccgtcaggatcagtcaatcatcctcctgggcagtagtggcagtggcaagaccaccagctgccagcatctggtgcagtacctggccaccatcgcgggcatcagcgggaacaaggtgttttctgtggagaagtggcaggctctgtacaccctcctggaagcctttgggaacagccccaccatcattaatggcaatgccacccgcttctcccagatcctctccctggactttgaccaagctggccaggtggcctcagcctccattcagacaatgcttctggagaagctgcgtgtggctcggcgcccagccagtgaagccacattcaacgtcttctactacctgctggcctgtggggatggcaccctcaggacagagctccacctcaaccacttggcagagaacaatgtgtttgggattgtgccactggccaagcctgaggaaaagcagaaggcagctcagcagtttagtaagctgcaggcggccatgaaggtgctgggcatctcccccgatgaacagaaggcctgctggttcattctggctgccatctaccacctgggggctgcgggagccaccaaagaagctgctgaagctgggcgcaagcagtttgcccgccatgagtgggcccagaaggctgcgtacctactgggctgcagcctggaggagctgtcctcagccatcttcaagcaccagcacaagggtggcaccctgcagcgctccacctccttccgccagggccccgaggagagtggcctgggagatgggacaggcccgaaactgagtgcactggagtgccttgagggcatggcggccggcctctacagcgagctcttcacccttctcgtctccctggtgaatagggctctcaagtccagccagcactcactctgctccatgatgattgtcgacaccccgggcttccagaaccctgagcagggtgggtcagcccgcggagcctcctttgaggagctgtgccacaactacacccaagaccggctgcagaggctcttccacgagcgcaccttcgtgcaggagttggaaagatacaaggaggagaacatcgagctggcgtttgacgacttggaacccccgacggatgactctgtggctgctgtggaccaggcctcccatcagtccctggtccgctcgctggcccgcacagacgaggcgaggggcctgctctggctattggaagaggaggctctggtgccaggggccagtgaggacaccctcctggagcgccttttctcctattatggcccccaggaaggtgacaaaaaaggccaaagcccccttctgcacagcagcaaaccacaccactttctcctgggccacagccatggcaccaactgggtagagtacaatgtgactggctggctgaactacaccaagcagaacccagccacccagaatgccccccggctcctgcaggactcccagaaaaaaatcatcagcaacctgtttctgggccgcgcaggcagtgccacggtgctctctggctccatcgcgggcctggagggcggctcgcagctggcactgcgccgggccaccagcatgcggaaaacctttaccacaggcatggcggctgtcaaaaagaagtcactgtgcatccagatgaagctacaggtggacgccctcatcgacaccatcaagaagtcaaagctgcattttgtgcactgcttcctgcctgtagctgagggctgggctggggagccccgttccgcctcctcccgccgagtcagcagcagcagtgagctggacctgccctcgggagaccactgcgaggctgggctcctgcagctcgacgtgcccctgctccgcacccagctccgcggctcccgcctgctcgatgccatgcgcatgtaccgccaaggttaccctgaccacatggtgttttccgagttccgccgccgctttgatgtcctggccccgcacctgaccaagaaacacgggcgtaactacatcgtggtggatgaaaggcgggcagtggaggagctgctggagtgcttggatctggagaagagcagctgctgcatgggcctgagccgggtgttcttccgggcgggcaccttggcacggctggaggagcagcgggatgaacaaaccagcaggaacctaaccctgttccaagcagcctgcaggggctacctggcccgccagcacttcaagaagagaaagatccaggacctggccattcgctgtgtacagaagaacatcaagaagaacaaaggggtgaaggactggccctggtggaagctttttaccacagtgaggcccctcatcgaagtacagctgtcagaggagcagatccggaacaaagacgaggagatccagcagctgcggagcaagctcgagaaggcggagaaggagaggaacgagctgcggctcaacagtgaccggctggagagccggatctcagagctgacatcggagctgacagatgagcgtaacacaggagagtccgcctcccagctgctggacgcggagacagcagagaggctccgggctgagaaggagatgaaggaactgcagacccagtacgatgcactgaagaagcagatggaggttatggaaatggaggtgatggaggcccgtctcatccgggcagcggagatcaacggggaagtggatgatgatgatgcaggtggcgagtggcggctgaagtatgagcgggctgtgcgggaggtggacttcaccaagaaacggctccagcaggagtttgaggacaagctggaggtggagcagcagaacaagaggcagctggaacggcggctcggggacctgcaggcagatagtgaggagagtcagcgggctctgcagcagctcaagaagaagtgccagcgactgacggctgagctgcaagacaccaagctgcacctggagggccagcaggtccgcaaccacgaactggagaagaagcagaggaggtttgacagtgagctctcgcaggcgcatgaggaggcccagcgggagaagctgcagcgggagaagctgcagcgggagaaggacatgctcctcgctgaggctttcagcctgaagcagcaactagaggaaaaagacatggacattgcagggttcacccagaaggttgtgtctctagaggcagagctccaggacatttcttcccaagagtccaaggatgaggcttctctggccaaggtcaagaaacagctccgggacctggaggccaaagtcaaggatcaggaagaagagctggatgagcaggcagggaccatccagatgctggaacaggccaagctgcgtctggagatggagatggagcggatgagacagacccattctaaggagatggagagtcgggatgaggaggtggaggaggcccggcagtcgtgtcagaagaagttaaaacagatggaggtgcagctagaggaagagtatgaggacaagcagaaggttctgcgagagaagcgggagctggagggcaagctcgccaccctcagcgaccaggtgaaccggcgggactttgagtcagagaagcggctgcggaaggacctgaagcgcaccaaggccctgctggcagatgcccagctcatgctggaccacctgaagaacagtgctcccagcaagcgagagattgcccagctcaagaaccagctggaggagtcagagttcacctgtgcggcagccgtgaaagcacggaaagcaatggaggtggagatcgaagacctgcacctgcagattgatgacatcgccaaagccaagacagcgctggaggagcagctgagccgccttcagcgtgagaagaatgagatccagaaccggctggaggaagatcaggaagacatgaacgaattgatgaagaagcacaaggctgccgtggctcaggcttcccgggacctggctcagataaatgatctccaagctcagctagaagaagccaacaaagagaagcaggagctgcaggagaagctacaagccctccagagccaggtggagttcctggagcagtccatggtggacaagtccctggtgagcaggcaggaagctaagatacgggagctggagacacgcctggagtttgaaaggacgcaagtgaaacggctggagagcctggctagccgtctcaaggaaaacatggagaagctgactgaggagcgggatcagcgcattgcagccgagaaccgggagaaggaacagaacaagcggctacagaggcagctccgggacaccaaggaggagatgggcgagcttgccaggaaggaggccgaggcgagccgcaagaagcacgaactggagatggatctagaaagcctggaggctgctaaccagagcctgcaggctgacctaaagttggcattcaagcgcatcggggacctgcaggctgccattgaggatgagatggagagtgatgagaatgaggacctcatcaacagtgagggagactctgatgtggactcggagctggaggaccgtgttgacggggtcaagtcctggttgtcaaaaaacaagggaccttccaaggcagcttctgatgatggcagcttaaagagttccagccccaccagctactggaagtcccttgcccctgatcggtcagatgatgagcacgaccctctcgacaacacctccagaccgcgatactcccacagttatctgagtgacagcgacacagaggccaagctgacggagactaacgcatagcccaggggagtggttggcagccctctcaccccagggcctgtggctgcctgggcacctctcccaggaagtggtggggcaccggtctcccccacccgactgctgatctgcatgggaaacaccctgaccttcttctgtcaggggcactttccaggctatgggtgtctgatgtctccacgtggaagaggtgggggaaagaggagtttctgaagagaactttttgctcctctgtctcaaaatgccagactcttggcttctaccctgtgtcaccgtgggcagtggcaggtggcctggcactgcatggagccagcacgttgacctccctctcagctccctgctcagggacggtggacaggttgcctactgggacactctaggttgctgggtccatggggaggattgggggaggagaagcagtgccttccctctcgtgtggggtgggggctctctcttcttggtgcctgctgtctttctactttttaatttaaatacccaacctctccatcacagctgcatccctgagagtgggagggggctgtagtggtagctggggctcccaagaacgactcgggaatgtcatctccatcttcacccttcagagagcagtcctttctctgtgcagctggagacgctggtgaggagagccgggtccaggttcttaagaatgaggtgcggaggggctctccggtgctgctgggctgggttgagcaagcctacgcagacaagtgtgtgtgtggaccatccgcacctccagcccccaccccaccctctttgtctcagcgtgttatgtgcaatgacctatttaaggtaaacccattccaactacagcagttcagggctgatccaagcactgcctccctcctgctctgtccaggtggtctggaccataaactcaacttgagagggaaggcttggggttgaggacttgtgatcagaaaaactgaagatggaagttttggccggtgctcattagacatgagtcctcactctgtgtcctgagcccgtgtcattcttccaacctccctgcccccacacacttatcccagacacaacaccatgtggtctggaggtcccagcccccaccctaaaaaggttatccctgagaactccaccagacttgggagcccaagtgcagtgcctggtgctgctcccatctgccgccccccttctctcctgcaattggtttgtactcactgggctgtgctctcccctgtttacccgatgtatggaaataaaggcccttttcctcctggctgcgccagtaaaaaaaa

SEQ ID NO: 48 - protein, 1106 aa, Human
  PALLD
MSGTSSHESFYDSLSDMQEESKNTDFFPGLSAFLSQEEINKSLDLARRAIADSETEDFDSEKEISQIFSTSPASLCEHPSHKETKLGEHASRRPQDNRSTPVQPLAEKQTKSISSPVSKRKPAMSPLLTRPSYIRSLRKAEKRGAKTPSTNVKPKTPHQRKGGPQSQLCDKAANLIEELTSIFKAAKPRNRSPNGESSSPDSGYLSPKNQPSALLSASASQSPMEDQGEMEREVKSPGARHCYQDNQDLAVPHNRKSHPQPHSALHFPAAPRFIQKLRSQEVAEGSRVYLECRVTGNPTPRVRWFCEGKELHNTPDIQIHCEGGDLHTLIIAEAFEDDTGRYTCLATNPSGSDTTSAEVFIEGASSTDSDSESLAFKSRAGAMPQAQKKTTSVSLTIGSSSPKTGVTTAVIQPLSVPVQQVHSPTSYLCRPDGTTTAYFPPVFTKELQNTAVAEGQVVVLECRVRGAPPLQVQWFRQGSEIQDSPDFRILQKKPRSTAEPEEICTLVIAETFPEDAGIFTCSARNDYGSATSTAQLVVTSANTENCSYESMGESNNDHFQHFPPPPPILETSSLELASKKPSEIQQVNNPELGLSRAALQMQFNAAERETNGVHPSRGVNGLINGKANSNKSLPTPAVLLSPTKEPPPLLAKPKLGFPKKASRTARIASDEEIQGTKDAVIQDLERKLRFKEDLLNNGQPRLTYEERMARRLLGADSATVFNIQEPEEETANQEYKVSSCEQRLISEIEYRLERSPVDESGDEVQYGDVPVENGMAPFFEMKLKHYKIFEGMPVTFTCRVAGNPKPKIYWFKDGKQISPKSDHYTIQRDLDGTCSLHTTASTLDDDGNYTIMAANPQGRISCTGRLMVQAVNQRGRSPRSPSGHPHVRRPRSRSRDSGDENEPIQERFFRPHFLQAPGDLTVQEGKLCRMDCKVSGLPTPDLSWQLDGKPVRPDSAHKMLVRENGVHSLIIEPVTSRDAGIYTCIATNRAGQNSFSLELVVAAKEAHKPPVFIEKLQNTGVADGYPVRLECRVLGVPPPQIFWKKENESLTHSTDRVSMHQDNHGYICLLIQGATKEDAGWYTVSAKNEAGIVSCTARLDVYISRH

SEQ ID NO: 49 - DNA, 5809 bp, Human
  PALLD
gtgaccacggaccaggcagtctctaatgaataggcaaggccacaacctccattctcccagaaaagaagaaatgctcatctgaaattcatcacctctctggagtcttcaaactgaccaagcattgaaaagaacacagtttcagaaaacagtttccagtgcctctggccttcctactgaaagcagacacagagtgcatgaagaccgttcaaatatgtcagggacctcctcccatgagtccttctatgactccctctcagacatgcaggaagaaagcaagaatactgacttcttcccgggcctttctgctttcctcagccaggaagagataaacaagagtcttgacctggcccggagagccatagccgactccgaaacagaagattttgactcggaaaaggagatctcgcagattttcagtacttctcctgcaagcctctgtgaacatccttcccataaggagaccaaattgggtgaacacgcctcgaggagacctcaggataacaggtcaacacctgtccagcctctggcagagaaacaaactaagagtatctcttcacctgtttcaaagaggaaacctgccatgtcacccctgctcaccaggcccagctacatccggagcctccgaaaggctgaaaagcgtggtgcaaaaactcccagcacaaacgtaaagcccaaaacgccacatcaaagaaagggtggcccccagagccagctgtgtgacaaggcagctaatttaattgaggagctaacatccatatttaaagccgcaaagccaagaaacagaagcccaaatggggagtcctcgtcaccagacagtgggtacctgtctcctaaaaatcagccgtcagccctgctgagtgcctcagccagccagagccctatggaagaccaaggggagatggaaagagaggtcaagtcccctggggccaggcattgctaccaggacaaccaggacttggcagtgccacacaaccgcaagtctcacccacagccccacagcgccctccacttcccagctgcacctcgattcatccaaaagctgaggagccaagaagtagcagaagggagccgagtttatctggagtgtagagtcactggaaaccccactcctcgagtcagatggttctgtgaagggaaagaactgcacaacactcctgatattcaaatccactgtgagggaggggacctccataccctgatcatagcagaggcctttgaggacgacacaggtcgctacacctgtttggctacgaatcccagcggctcagacacaacatctgctgaggtgttcattgaaggtgccagttcaacagattctgacagtgaaagtttagctttcaaatcaagagctggagctatgccacaagctcaaaagaaaacaacttctgtttccttgacaataggatcatcatctccaaagacaggggtgaccacagctgtgattcaaccactgtctgtccctgtgcaacaggttcacagtccaacttcatatctctgccgacctgatggaaccactactgcctactttcctcctgtttttacaaaggaactgcaaaacacagccgtggcggaaggccaggtggtggttctggagtgccgggtccgtggggcaccccctctgcaggtccagtggtttcggcaagggagtgaaatccaagactctccagatttccgaattctacagaaaaaacctagatctacagctgaacctgaggagatttgcaccctagttatcgctgagactttccctgaagatgcagggatctttacatgttcagcaagaaatgattatggatcagcaaccagcactgcccagctggttgtcacctcagccaacactgaaaactgtagttacgagtcaatgggagaatccaacaatgaccacttccaacactttccacctccccctccaatcttggagacaagttccttggagttggcttcaaagaaaccatctgagatccagcaggtgaacaaccctgagttaggcctgagcagggcagcccttcaaatgcaattcaatgctgctgagagggaaacgaacggagtccatcccagccgtggagtaaatggactgattaacggcaaagctaacagtaataaatctcttccaacaccagctgtcctgctttcacccactaaggagccaccacctctgcttgccaaaccaaaactaggatttccaaagaaggccagtagaactgctagaatagcctccgatgaggaaattcaaggcacaaaggatgctgttattcaagacctggaacgaaaacttcgcttcaaggaggacctcctgaacaatggccagccgaggttaacatacgaagaaagaatggctcgtcgactgctaggtgctgacagtgcaactgtctttaatattcaggagccagaagaggaaacagctaatcaggaatacaaagtctccagctgtgaacagagactcatcagtgaaatagagtacaggctagaaaggtctcctgtggatgaatcaggtgatgaagttcagtatggagatgtgcctgtggaaaatggaatggcaccattctttgagatgaagctgaaacattacaagatctttgagggaatgccagtaactttcacatgtagagtggctggaaatccaaagccaaagatctattggtttaaagatgggaagcagatctctccaaagagtgatcactacaccattcaaagagatctcgatgggacctgctccctccataccacagcctccaccctagatgatgatgggaattatacaattatggctgcaaaccctcagggccgcatcagttgtactggacggctaatggtacaggctgtcaaccaaagaggtcgaagtccccggtctccctcaggccatcctcatgtcagaaggcctcgttctagatcaagggacagtggagacgaaaatgaaccaattcaggagcgattcttcagacctcacttcttgcaggctcctggagatctgactgttcaagaaggaaaactctgcagaatggactgcaaagtcagtgggttaccaaccccagatctaagctggcaactagatggaaagcccgtacgccctgacagtgctcacaagatgctggtgcgtgagaacggggtgcactctctgatcatagagccagtcacgtcacgtgatgccggcatctacacatgtatagctaccaaccgagcaggacagaactcattcagcctggagcttgtggttgctgctaaagaagcacacaaaccccctgtgtttattgagaagctccaaaacacaggagttgctgatgggtacccagtgcggctggaatgtcgtgtattgggagtgccaccacctcagatattttggaagaaagaaaatgaatcactcactcacagcactgaccgagtgagcatgcaccaggacaaccacggctacatctgcctgctcattcagggagccacaaaagaagatgctgggtggtatactgtgtcagccaagaatgaagcagggattgtgtcctgtactgccaggctggacgtttacatttctcgacattaatagtgaaccacaccaggagaacaaatacccaacccagtggcatcagcagtcacagagcaccaagccaaaaaaagtacggccctcagccagtcgctatgcagcactttcggaccagggactagacatcaaagcagcgttccaacctgaggccaacccatctcacctgacactgaatactgccttggtagaaagtgaggacctgtaatccagcattcttgttaaagctgaaacactgaaacagccattgccttgaccaacatattcctttgtcacattatgtaaaaggcagaaacatacctttgactataagaaattaaaaaaaaaacaccaaaataatatttttcttacttgatataccaaacttagtttaagtagataatgctaatacaaatatacacattgcacagaaaatacacatttactgtccaatttaaaactttggaattgctgtgattaaagtgatcaaaatgccaaaatactaaaggaaatcaattgttcacaggtaactacaatttgtattatctacaagtgcctttaaacacaagatataggtgctgtgtagcctgatagtgtgaaatgtttaatgagggagttgtaccacaaacagtactacaatgattctgaagcacagtgtattcagacagatacagtgaaccaagtgcaatatgtaaggatgaaagaagaagagatgacaaagaaatccaagtaaatgccttgtctttgcaaatgtttttatattaaatcataaggaaggaactacttgccttaaatgttaatatcaaaagagttttctaacaaggttaataccttagttcttaacattttttttctttatgtgtagtgttttcatgctaccttggtaggaaacttatttacaaaccatattaaaaggctaatttaaatataaataatataaagtgctctgaataaagcagaaatatattacagttcattccacagaaagcatccaaaccacccaaatgaccaaggcatatatagtatttggaggaatcaggggtttggaaggagtagggaggagaatgaaggaaaatgcaaccagcatgattatagtgtgttcatttagataaaagtagaaggcacaggagaggtagcaaaggccaggcttttctttggttttcttcaaacataggtgaaaaaaacactgccattcacaagtcaaggaacccagggccagctggaagtgtggagcacacatgctgtggagcacacatgctgtggagattgcagtgtgtctgaggtttgtgtagtagtggaagattttaggtatgtagagcaagttgaaaatggattgagactgcatggtggcataaatgagaaattgcctgtagcatctagtctacttgaaggaagtggagacataaggagagacaaaaacaggtttgtgccataaagtattttttcaaagacaccaagatgtggtaaatgaaaattattagttcacttccctgctgccatgaaactttgccttaagaaggtgctggattccaaggtttgtaaaggcatctcggtaaagactgctttttgaatgcatatgattttgcatcagctagactgagttgattctgaccagacttgatggttttaagtcggaaccgataaattttaaaaaggagaaaaaataatttgacctagtagtataaaacatgaggctttaatggtactttgctatgaaaagaaaacactgtattccttatgcaaaacacatgtatctttcattatttataagtggcctctcttagctcagttactcaattcatacgtagtattttttaaaataattttatatctgtgtaccaccccatatatttcatattactgtttcacatgtacagctttctacttctttgtaagaacaccaaccaaccaaggtttaagtgattaataggcttgagcaccgggtggcagatgttctatgcagtgtggttcaagtttctttgaccgcacttatatgcattgctaatatggaatttaagataccatacacagtctctcatggacctatctctattgtagaattatgacttatgtcttacttgccaaatttttctgaatgtgacctttttttgctgatttgctgggtttgggattaactagcattattttgccacctttatattgtatttataaaaaaaaaagtactatcaatcaatcatactactttggattgttgtgctggtgtaatgtggatttaacatcaataaatatttgacaaataatagttgcagttttgtgaagcaaaataaatattcagtttta

SEQ ID NO: 50 - protein, 657 aa, Human
  SASS6
MSQVLFHQLVPLQVKCKDCEERRVSIRMSIELQSVSNPVHRKDLVIRLTDDTDPFFLYNLVISEEDFQSLKFQQGLLVDFLAFPQKFIDLLQQCTQEHAKEIPRFLLQLVSPAAILDNSPAFLNVVETNPFKHLTHLSLKLLPGNDVEIKKFLAGCLKCSKEEKLSLMQSLDDATKQLDFTRKTLAEKKQELDKLRNEWASHTAALTNKHSQELTNEKEKALQAQVQYQQQHEQQKKDLEILHQQNIHQLQNRLSELEAANKDLTERKYKGDSTIRELKAKLSGVEEELQRTKQEVLSLRRENSTLDVECHEKEKHVNQLQTKVAVLEQEIKDKDQLVLRTKEAFDTIQEQKVVLEENGEKNQVQLGKLEATIKSLSAELLKANEIIKKLQGDLKTLMGKLKLKNTVTIQQEKLLAEKEEKLQKEQKELQDVGQSLRIKEQEVCKLQEQLEATVKKLEESKQLLKNNEKLITWLNKELNENQLVRKQDVLGPSTTPPAHSSSNTIRSGISPNLNVVDGRLTYPTCGIGYPVSSAFAFQNTFPHSISAKNTSHPGSGTKVQFNLQFTKPNASLGDVQSGATISMPCSTDKENGENVGLESKYLKKREDSIPLRGLSQNLFSNSDHQRDGTLGALHTSSKPTALPSASSAYFPGQLPNS

SEQ ID NO: 51 - DNA, 3908 bp, Human
  SASS6
cccctcgtttctccctccccgcctcctccgcagaagccgagcgccaaactcaaactttatcaggacccggacctctcaggctaatcccgagggccgggcctgttgggcttttctgcacaccagccgaggcagcgagccaacatgagccaagtgctgttccaccaactagtcccgttgcaggtgaaatgcaaagactgtgaggagaggagagtaagtataagaatgagcattgaactacaatcagtttctaatccagttcacagaaaggacttagttattcgtctgactgatgacacggatccattttttttatataaccttgttatatctgaggaagattttcaaagtttaaaattccagcaaggtcttctggtagacttcttagctttcccacaaaaatttatagatctccttcagcaatgtactcaagaacatgccaaagaaattccaaggtttttgctacagttagtttctccagcagctattttggataactcacctgcatttttaaatgtggtagagacaaatccttttaagcatcttacacacctctcactaaaacttttacctggaaatgatgtggagataaagaaatttctcgcaggctgtttgaaatgtagcaaggaagaaaaattatcattgatgcaatcactagatgatgctactaagcaactggactttacacgaaagacattagcagaaaaaaaacaagaattagataagttacggaatgaatgggcgtcacatacagcagccttgacaaacaagcattctcaggaactgacaaatgaaaaggaaaaagccttgcaggcacaggttcaatatcaacagcagcatgaacaacagaaaaaagatttagaaatcctccatcaacaaaacatccaccagctacaaaacagactgtctgagttagaagcggctaataaagacttaaccgaaagaaaatataaaggagactccactattagagaacttaaagcaaaactttctggtgttgaagaggagctacagcggactaagcaagaagtcctctctttgcgaagagagaattctacactagatgttgaatgccacgagaaagaaaagcacgttaatcagctacaaacaaaagtggcagttttagaacaggaaatcaaggataaggaccagcttgttttaagaacaaaagaggcatttgatacaatccaggaacaaaaggtggttttagaagaaaatggtgagaaaaatcaagtacaactaggaaagcttgaagctacaataaaatcattatctgcagaacttctgaaggcaaatgaaattatcaagaagttacaaggggatctgaaaactttaatgggtaagttgaaattgaagaatacagttactattcagcaagaaaaactcttggctgagaaggaggaaaaattacaaaaggaacaaaaggaattacaagatgttggacagtctcttcgaattaaagagcaagaggtatgcaaattacaagaacaattagaagctacagttaaaaaacttgaagaaagcaaacaacttctaaaaaataatgaaaagttaatcacgtggttaaataaagaactaaatgaaaatcagctagtgagaaagcaagatgtattgggaccttctactactccgcctgcacattccagcagcaacacaatcagaagtggaatttctcctaacctgaatgtggttgatggtagactgacttacccaacctgtgggattggttatcctgtctcctctgcatttgcattccagaataccttccctcattcgatatctgccaaaaataccagccaccctggttcaggaacaaaggttcagtttaatttgcagtttacaaaaccaaatgcatcactaggagatgttcagtcaggagcaactattagtatgccttgctcaactgataaggaaaatggtgaaaatgtagggttggaatccaaatacctgaagaaaagggaagatagcattcctttacgcggactcagccagaacctatttagtaattcagaccatcagagagatggcactttaggagcattacatacatcttccaaacccacagcgctcccctctgcgtcttcagcctatttccctgggcagttaccaaacagttaattctagtgtcatgttttactttttattggtattttagaaactcaggtgcttaaaaaatatgtcaacacaaaccagatcctcaaatagcaagtttcaaattttacttgagctgttaaagactggatactttaagtactgcttttatggcagtttataatataggaacaaatttgtacttggggattggtaaagattgtgagtaaatgacattttttggtttgtgaacatggcgttttatagaataatatgaattttattaagctattctttagaaattcagttctaaggaaagagttgatccttatgagggagattctgatcatattaaaaatctgggtaaactaaaacctgctcataacctcatagtatgcaaccaaagaatactaattcattttatcactttcattggtaaaacttttaaattcaacacctgaaaatcatgagggaaaatgattacctcttgagatatattattgatgacatttaaagggaaaagtcctaaatttaccttaaataactgaaatgaattaagccttcatagcgtattttccttgaagcatttaaatttgctagtgatgaatcaaataaatttgatatacttaaaataatttggacagtttttatgtgaccagattaagtgcttttgtcatttgagctgacaagtttttaaaacttcagtgcttcctaaatgtttatactcatctagtttttctcaatttgtagttttattatgcagttaaatctgtatcagtggacttttaaaacttggtactactactaaatctactatatcatgaatattcatttatttttatagtatcagaacttgggttgatttcaatgttaataaactaggcaaaacaaataactgttagaaggtacaattttcttctcttccctgtaactgaaagttttaagaattgttccttggggaaaaatttttttaaaattcacctagaatcatagggcctcattttgttttcttattgacaaacaatacctggtagcattctctaaagagtcttctagatcaatttttataaagtactaatgctcatgtgataatttaaaattattttcaactactttattacacagatgaagaaacatttcaagatattgatgtaataacattactgagtcccatggtaagaaagaatctttgctaattttttttttttttttacgaagccagtatcttgaaactattggcaattgcaagtgtctttaaactagggatctaatctgaaaattcagtaactaatattaggcagttgatactcccccacctcccccatttagatacactactgtattagtgagaatacttggtacagtaacttgaaagcacttgctattctggaaagaagcctcttggtgattttggaaggagctttattgtaaatactatggaaggggctttgttgtaaatactatgtaatatatataaaatattgtgacatgttttggatgggatgcatgacatacaggtagctctcttttttaaaatataggtatctctttgcatatatatacacaaggaaagttgaattttcaggagagatcattctgatatcttgcaaatttgtattaaatgtatacagacttccaagtgtgctaattctttacctcctaaacttttagttgcaattgttttgcagtgtaaaattgtacatgtgttaataatcaaaaagtgttgcatttaatgttatttctgtaaactttgagctttgttaataaactattatgcagcatctacactttgaaaatcttgtacttcaaaaaaaaaaaaa

SEQ ID NO: 52 - protein, 370 aa, Human
  PSAT1
MDAPRQVVNFGPGPAKLPHSVLLEIQKELLDYKGVGISVLEMSHRSSDFAKIINNTENLVRELLAVPDNYKVIFLQGGGCGQFSAVPLNLIGLKAGRCADYVVTGAWSAKAAEEAKKFGTINIVHPKLGSYTKIPDPSTWNLNPDASYVYYCANETVHGVEFDFIPDVKGAVLVCDMSSNFLSKPVDVSKFGVIFAGAQKNVGSAGVTVVIVRDDLLGFALRECPSVLEYKVQAGNSSLYNTPPCFSIYVMGLVLEWIKNNGGAAAMEKLSSIKSQTIYEIIDNSQGFYVCPVEPQNRSKMNIPFRIGNAKGDDALEKRFLDKALELNMLSLKGHRSVGGIRASLYNAVTIEDVQKLAAFMKKFLEMHQL

SEQ ID NO: 53 - protein, 324 aa, Human
  PSAT1
MDAPRQVVNFGPGPAKLPHSVLLEIQKELLDYKGVGISVLEMSHRSSDFAKIINNTENLVRELLAVPDNYKVIFLQGGGCGQFSAVPLNLIGLKAGRCADYVVTGAWSAKAAEEAKKFGTINIVHPKLGSYTKIPDPSTWNLNPDASYVYYCANETVHGVEFDFIPDVKGAVLVCDMSSNFLSKPVDVSKFGVIFAGAQKNVGSAGVTVVIVRDDLLGFALRECPSVLEYKVQAGNSSLYNTPPCFSIYVMGLVLEWIKNNGGAAAMEKLSSIKSQTIYEIIDNSQGFYVSVGGIRASLYNAVTIEDVQKLAAFMKKFLEMHQL

SEQ ID NO: 54 - DNA, 2221 bp, Human
  PSAT1
ggccaggaacgccagccgttcacgcgttcggtcctccttggctgactcaccgccctggccgccgcaccatggacgcccccaggcaggtggtcaactttgggcctggtcccgccaagctgccgcactcagtgttgttagagatacaaaaggaattattagactacaaaggagttggcattagtgttcttgaaatgagtcacaggtcatcagattttgccaagattattaacaatacagagaatcttgtgcgggaattgctagctgttccagacaactataaggtgatttttctgcaaggaggtgggtgcggccagttcagtgctgtccccttaaacctcattggcttgaaagcaggaaggtgtgctgactatgtggtgacaggagcttggtcagctaaggccgcagaagaagccaagaagtttgggactataaatatcgttcaccctaaacttgggagttatacaaaaattccagatccaagcacctggaacctcaacccagatgcctcctacgtgtattattgcgcaaatgagacggtgcatggtgtggagtttgactttatacccgatgtcaagggagcagtactggtttgtgacatgtcctcaaacttcctgtccaagccagtggatgtttccaagtttggtgtgatttttgctggtgcccagaagaatgttggctctgctggggtcaccgtggtgattgtccgtgatgacctgctggggtttgccctccgagagtgcccctcggtcctggaatacaaggtgcaggctggaaacagctccttgtacaacacgcctccatgtttcagcatctacgtcatgggcttggttctggagtggattaaaaacaatggaggtgccgcggccatggagaagcttagctccatcaaatctcaaacaatttatgagattattgataattctcaaggattctacgtttgtccagtggagccccaaaatagaagcaagatgaatattccattccgcattggcaatgccaaaggagatgatgctttagaaaaaagatttcttgataaagctcttgaactcaatatgttgtccttgaaagggcataggtctgtgggaggcatccgggcctctctgtataatgctgtcacaattgaagacgttcagaagctggccgccttcatgaaaaaatttttggagatgcatcagctatgaacacatcctaaccaggatatactctgttcttgaacaacatacaaagtttaaagtaacttggggatggctacaaaaagttaacacagtatttttctcaaatgaacatgtttattgcagattcttcttttttgaaagaacaacagcaaaacatccacaactctgtaaagctggtgggacctaatgtcaccttaattctgacttgaactggaagcattttaagaaatcttgttgcttttctaacaaattcccgcgtattttgcctttgctgctactttttctagttagatttcaaacttgcctgtggacttaataatgcaagttgcgattaattatttctggagtcatgggaacacacagcacagagggtaggggggccctctaggtgctgaatctacacatctgtggggtctcctgggttcagcggctgttgattcaaggtcaacattgaccattggaggagtggtttaagagtgccaggcgaagggcaaactgtagatcgatctttatgctgttattacaggagaagtgacatactttatatatgtttatattagcaaggtctgtttttaataccatatactttatatttctatacatttatatttctaataatacagttatcactgatatatgtagacacttttagaatttattaaatccttgaccttgtgcattatagcattccattagcaagagttgtaccccctccccagtcttcgccttcctctttttaagctgttttatgaaaaagacctagaagttcttgattcatttttaccattctttccataggtagaagagaaagttgattggttggttgtttttcaattatgccattaaactaaacatttctgttaaattaccctatcctttgttctctactgttttctttgtaatgtatgactacgagagtgatactttgctgaaaagtctttcccctattgtttatctattgtcagtattttatgttgaatatgtaaagaacattaaagtcctaaaacatctaaaaaaaaaaaaaaaaaaaaaaaaaaaaaaaaaaa

SEQ ID NO: 55 - DNA, 2083 bp, Human
  PSAT1
ggccaggaacgccagccgttcacgcgttcggtcctccttggctgactcaccgccctggccgccgcaccatggacgcccccaggcaggtggtcaactttgggcctggtcccgccaagctgccgcactcagtgttgttagagatacaaaaggaattattagactacaaaggagttggcattagtgttcttgaaatgagtcacaggtcatcagattttgccaagattattaacaatacagagaatcttgtgcgggaattgctagctgttccagacaactataaggtgatttttctgcaaggaggtgggtgcggccagttcagtgctgtccccttaaacctcattggcttgaaagcaggaaggtgtgctgactatgtggtgacaggagcttggtcagctaaggccgcagaagaagccaagaagtttgggactataaatatcgttcaccctaaacttgggagttatacaaaaattccagatccaagcacctggaacctcaacccagatgcctcctacgtgtattattgcgcaaatgagacggtgcatggtgtggagtttgactttatacccgatgtcaagggagcagtactggtttgtgacatgtcctcaaacttcctgtccaagccagtggatgtttccaagtttggtgtgatttttgctggtgcccagaagaatgttggctctgctggggtcaccgtggtgattgtccgtgatgacctgctggggtttgccctccgagagtgcccctcggtcctggaatacaaggtgcaggctggaaacagctccttgtacaacacgcctccatgtttcagcatctacgtcatgggcttggttctggagtggattaaaaacaatggaggtgccgcggccatggagaagcttagctccatcaaatctcaaacaatttatgagattattgataattctcaaggattctacgtgtctgtgggaggcatccgggcctctctgtataatgctgtcacaattgaagacgttcagaagctggccgccttcatgaaaaaatttttggagatgcatcagctatgaacacatcctaaccaggatatactctgttcttgaacaacatacaaagtttaaagtaacttggggatggctacaaaaagttaacacagtatttttctcaaatgaacatgtttattgcagattcttcttttttgaaagaacaacagcaaaacatccacaactctgtaaagctggtgggacctaatgtcaccttaattctgacttgaactggaagcattttaagaaatcttgttgcttttctaacaaattcccgcgtattttgcctttgctgctactttttctagttagatttcaaacttgcctgtggacttaataatgcaagttgcgattaattatttctggagtcatgggaacacacagcacagagggtaggggggccctctaggtgctgaatctacacatctgtggggtctcctgggttcagcggctgttgattcaaggtcaacattgaccattggaggagtggtttaagagtgccaggcgaagggcaaactgtagatcgatctttatgctgttattacaggagaagtgacatactttatatatgtttatattagcaaggtctgtttttaataccatatactttatatttctatacatttatatttctaataatacagttatcactgatatatgtagacacttttagaatttattaaatccttgaccttgtgcattatagcattccattagcaagagttgtaccccctccccagtcttcgccttcctctttttaagctgttttatgaaaaagacctagaagttcttgattcatttttaccattctttccataggtagaagagaaagttgattggttggttgtttttcaattatgccattaaactaaacatttctgttaaattaccctatcctttgttctctactgttttctttgtaatgtatgactacgagagtgatactttgctgaaaagtctttcccctattgtttatctattgtcagtattttatgttgaatatgtaaagaacattaaagtcctaaaacatctaaaaaaaaaaaaaaaaaaaaaaaaaaaaaaaaaaa

SEQ ID NO: 56 - protein, 806 aa, Human
  VCP
MASGADSKGDDLSTAILKQKNRPNRLIVDEAINEDNSVVSLSQPKMDELQLFRGDTVLLKGKKRREAVCIVLSDDTCSDEKIRMNRVVRNNLRVRLGDVISIQPCPDVKYGKRIHVLPIDDTVEGITGNLFEVYLKPYFLEAYRPIRKGDIFLVRGGMRAVEFKVVETDPSPYCIVAPDTVIHCEGEPIKREDEEESLNEVGYDDIGGCRKQLAQIKEMVELPLRHPALFKAIGVKPPRGILLYGPPGTGKTLIARAVANETGAFFFLINGPEIMSKLAGESESNLRKAFEEAEKNAPAIIFIDELDAIAPKREKTHGEVERRIVSQLLTLMDGLKQRAHVIVMAATNRPNSIDPALRRFGRFDREVDIGIPDATGRLEILQIHTKNMKLADDVDLEQVANETHGHVGADLAALCSEAALQAIRKKMDLIDLEDETIDAEVMNSLAVTMDDFRWALSQSNPSALRETVVEVPQVTWEDIGGLEDVKRELQELVQYPVEHPDKFLKFGMTPSKGVLFYGPPGCGKTLLAKAIANECQANFISIKGPELLTMWFGESEANVREIFDKARQAAPCVLFFDELDSIAKARGGNIGDGGGAADRVINQILTEMDGMSTKKNVFIIGATNRPDIIDPAILRPGRLDQLIYIPLPDEKSRVAILKANLRKSPVAKDVDLEFLAKMTNGFSGADLTEICQRACKLAIRESIESEIRRERERQTNPSAMEVEEDDPVPEIRRDHFEEAMRFARRSVSDNDIRKYEMFAQTLQQSRGFGSFRFPSGNQGGAGPSQGSGGGTGGSVYTEDNDDDLYG

SEQ ID NO: 57 - DNA, 3198 bp, Human
  VCP
ctgccactgccacctcgcggatcaggagccagcgttgttcgcccgacgcctcgctgccggtgggaggaagcgagagggaagccgcttgggctcttgtcgccgctgctcgcccaccgcctggaagagccgagccccggccagtcggtcgcttgccaccgctcgtagccgttacccgcgggccgccacagccgccggcgggagaggcgcgcgccatggcttctggagccgattcaaaaggtgatgacctatcaacagccattctcaaacagaagaaccgtcccaatcggttaattgttgatgaagccatcaatgaggacaacagtgtggtgtccttgtcccagcccaagatggatgaattgcagttgttccgaggtgacacagtgttgctgaaaggaaagaagagacgagaagctgtttgcatcgtcctttctgatgatacttgttctgatgagaagattcggatgaatagagttgttcggaataaccttcgtgtacgcctaggggatgtcatcagcatccagccatgccctgatgtgaagtacggcaaacgtatccatgtgctgcccattgatgacacagtggaaggcattactggtaatctcttcgaggtataccttaagccgtacttcctggaagcgtatcgacccatccggaaaggagacatttttcttgtccgtggtgggatgcgtgctgtggagttcaaagtggtggaaacagatcctagcccttattgcattgttgctccagacacagtgatccactgcgaaggggagcctatcaaacgagaggatgaggaagagtccttgaatgaagtagggtatgatgacattggtggctgcaggaagcagctagctcagatcaaagagatggtggaactgcccctgagacatcctgccctctttaaggcaattggtgtgaagcctcctagaggaatcctgctttacggacctcctggaacaggaaagaccctgattgctcgagctgtagcaaatgagactggagccttcttcttcttgatcaatggtcctgagatcatgagcaaattggctggtgagtctgagagcaaccttcgtaaagcctttgaggaggctgagaagaatgctcctgccatcatcttcattgatgagctagatgccatcgctcccaaaagagagaaaactcatggcgaggtggagcggcgcattgtatcacagttgttgaccctcatggatggcctaaagcagagggcacatgtgattgttatggcagcaaccaacagacccaacagcattgacccagctctacggcgatttggtcgctttgacagggaggtagatattggaattcctgatgctacaggacgcttagagattcttcagatccataccaagaacatgaagctggcagatgatgtggacctggaacaggtagccaatgagactcacgggcatgtgggtgctgacttagcagccctgtgctcagaggctgctctgcaagccatccgcaagaagatggatctcattgacctagaggatgagaccattgatgccgaggtcatgaactctctagcagttactatggatgacttccggtgggccttgagccagagtaacccatcagcactgcgggaaaccgtggtagaggtgccacaggtaacctgggaagacatcgggggcctagaggatgtcaaacgtgagctacaggagctggtccagtatcctgtggagcacccagacaaattcctgaagtttggcatgacaccttccaagggagttctgttctatggacctcctggctgtgggaaaactttgttggccaaagccattgctaatgaatgccaggccaacttcatctccatcaagggtcctgagctgctcaccatgtggtttggggagtctgaggccaatgtcagagaaatctttgacaaggcccgccaagctgccccctgtgtgctattctttgatgagctggattcgattgccaaggctcgtggaggtaacattggagatggtggtggggctgctgaccgagtcatcaaccagatcctgacagaaatggatggcatgtccacaaaaaaaaatgtgttcatcattggcgctaccaaccggcctgacatcattgatcctgccatcctcagacctggccgtcttgatcagctcatctacatcccacttcctgatgagaagtcccgtgttgccatcctcaaggctaacctgcgcaagtccccagttgccaaggatgtggacttggagttcctggctaaaatgactaatggcttctctggagctgacctgacagagatttgccagcgtgcttgcaagctggccatccgtgaatccatcgagagtgagattaggcgagaacgagagaggcagacaaacccatcagccatggaggtagaagaggatgatccagtgcctgagatccgtcgagatcactttgaagaagccatgcgctttgcgcgccgttctgtcagtgacaatgacattcggaagtatgagatgtttgcccagacccttcagcagagtcggggctttggcagcttcagattcccttcagggaaccagggtggagctggccccagtcagggcagtggaggcggcacaggtggcagtgtatacacagaagacaatgatgatgacctgtatggctaagtggtggtggccagcgtgcagtgagctggcctgcctggaccttgttccctgggggtggggcgcttgcccaggagagggaccaggggtgcgcccacagcctgctccattctccagtctgaacagttcagctacagtctgactctggacagggggtttctgttgcaaaaatacaaaacaaaagcgataaaataaaagcgattttcatttggtaggcggagagtgaattaccaacagggaattgggccttgggcctatgccatttctgttgtagtttggggcagtgcaggggacctgtgtggggtgtgaaccaaggcactactgccacctgccacagtaaagcatctgcacttgactcaatgctgcccgagccctcccttccccctatccaacctgggtaggtgggtaggggccacagttgctggatgtttatatagagagtaggttgatttattttacatgcttttgagttaatgttggaaaactaatcacaagcagtttctaaaccaaaaaatgacatgttgtaaaaggacaataaacgttgggtcaaaatggaaaaaaaaaaaaa

SEQ ID NO: 58 - protein, 2168 aa, Human
  BAZ2B
MESGERLPSSAASSTTPTSSSTPSVASVVSKGGLSTGVASLSSTINPCGHLFRTAGDQPFNLSTVSSAFPMVSHPVFGLHSASSGHSEFGGLGTLGTPTALAAHPQLASFPGAEWWRTTDAHTRTGATFFPPLLGIPPLFAPPAQNHDSSSFHSRTSGKSNRNGPEKGVNGSINGSNTSSVIGINTSVLSTTASSSMGQTKSTSSGGGNRKCNQEQSKNQPLDARVDKIKDKKPRKKAMESSSNSDSDSGTSSDTSSEGISSSDSDDLEEDEEEEDQSIEESEDDDSDSESEAQHKSNNQVLLHGISDPKADGQKATEKAQEKRIHQPLPLASESQTHSFQSQQKQPQVLSQQLPFIFQSSQAKEESVNKHTSVIQSTGLVSNVKPLSLVNQAKKETYMKLIVPSPDVLKAGNKNTSEESSLLTSELRSKREQYKQAFPSQLKKQESSKSLKKVIAALSNPKATSSSPAHPKQTLENNHPNPFLTNALLGNHQPNGVIQSVIQEAPLALTTKTKMQSKINENIAAASSTPFSSPVNLSTSGRRTPGNQTPVMPSASPILHSQGKEKAVSNNVNPVKTQHHSHPAKSLVEQFRGTDSDIPSSKDSEDSNEDEEEDDEEEDEEDDEDDESDDSQSESDSNSESDTEGSEEEDDDDKDQDESDSDTEGEKTSMKLNKTTSSVKSPSMSLTGHSTPRNLHIAKAPGSAPAALCSESQSPAFLGTSSSTLTSSPHSGTSKRRRVTDERELRIPLEYGWQRETRIRNFGGRLQGEVAYYAPCGKKLRQYPEVIKYLSRNGIMDISRDNFSFSAKIRVGDFYEARDGPQGMQWCLLKEEDVIPRIRAMEGRRGRPPNPDRQRAREESRMRRRKGRPPNVGNAEFLDNADAKLLRKLQAQEIARQAAQIKLLRKLQKQEQARVAKEAKKQQAIMAAEEKRKQKEQIKIMKQQEKIKRIQQIRMEKELRAQQILEAKKKKKEEAANAKLLEAEKRIKEKEMRRQQAVLLKHQERERRRQHMMLMKAMEARKKAEEKERLKQEKRDEKRLNKERKLEQRRLELEMAKELKKPNEDMCLADQKPLPELPRIPGLVLSGSTFSDCLMVVQFLRNFGKVLGFDVNIDVPNLSVLQEGLLNIGDSMGEVQDLLVRLLSAAVCDPGLITGYKAKTALGEHLLNVGVNRDNVSEILQIFMEAHCGQTELTESLKTKAFQAHTPAQKASVLAFLINELACSKSVVSEIDKNIDYMSNLRRDKWVVEGKLRKLRIIHAKKTGKRDTSGGIDLGEEQHPLGTPTPGRKRRRKGGDSDYDDDDDDDSDDQGDEDDEDEEDKEDKKGKKTDICEDEDEGDQAASVEELEKQIEKLSKQQSQYRRKLFDASHSLRSVMFGQDRYRRRYWILPQCGGIFVEGMESGEGLEEIAKEREKLKKAESVQIKEEMFETSGDSLNCSNTDHCEQKEDLKEKDNTNLFLQKPGSFSKLSKLLEVAKMPPESEVMTPKPNAGANGCTLSYQNSGKHSLGSVQSTATQSNVEKADSNNLFNTGSSGPGKFYSPLPNDQLLKTLTEKNRQWFSLLPRTPCDDTSLTHADMSTASLVTPQSQPPSKSPSPTPAPLGSSAQNPVGLNPFALSPLQVKGGVSMMGLQFCGWPTGVVTSNIPFTSSVPSLGSGLGLSEGNGNSFLTSNVASSKSESPVPQNEKATSAQPAAVEVAKPVDFPSPKPIPEEMQFGWWRIIDPEDLKALLKVLHLRGIREKALQKQIQKHLDYITQACLKNKDVAIIELNENEENQVTRDIVENWSVEEQAMEMDLSVLQQVEDLERRVASASLQVKGWMCPEPASEREDLVYFEHKSFTKLCKEHDGEFTGEDESSAHALERKSDNPLDIAVTRLADLERNIERRIEEDIAPGLRVWRRALSEARSAAQVALCIQQLQKSIAWEKSIMKVYCQICRKGDNEELLLLCDGCDKGCHTYCHRPKITTIPDGDWFCPACIAKASGQTLKIKKLHVKGKKTNESKKGKKVTLTGDTEDEDSASTSSSLKRGNKDLKKRKMEENTSINLSKQESFTSVKKPKRDDSKDLALCSMILTEMETHEDAWPFLLPVNLKLVPGYKKVIKKPMDFSTIREKLSSGQYPNLETFALDVRLVFDNCETFNEDDSDIGRAGHNMRKYFEKKWTDTFKVS

SEQ ID NO: 59 - DNA, 8145 bp, Human
  BAZ2B
acttggttcatgaagccttcgcctagaagtgaagctgctgaacaaaccttgagaagaatcatctcctgcttcaatctgctgctggataggaactaatcagagagagagaggcggaagacggagaaggagggagtcgaaggctttcccgatcacaaatctcacctccactacaactctctttatacttttcttgcagaaataataatagaaataaggaggtggtggggtttccaaaaatcttaaccttcaaccatctggggaaaaggcaaaaatcccatctaccgcaactctcagttcgagagtaaaggtttcccaacagtgatgtcacaagattgaccacattgatcacaatatggagtctggagaacggttaccatcctcagcagcctcctctactacaccaacttcatcttcgacaccttctgtggcttcagtagtttcaaaaggtggcctttccactggagttgcttcacttagctctacaatcaacccatgtggacatttattcagaacagctggggatcaaccgtttaacctgtccacagtgtcgagtgccttcccaatggtcagccacccagtctttggtctacattcagccagctcagggcattcagaatttggtggtttggggacacttggtacacccacagccttagccgcacatccccaactagcatcttttccaggtgcagaatggtggcgaacaactgatgctcatactcgtacaggagcaaccttctttccaccattactgggaattccaccactatttgctcccccagcccagaatcatgattcttcttcattccattcaaggacttcgggaaaaagtaatcgaaatggtcccgaaaaaggtgtaaatgggtcaataaatggaagtaatacatcatctgtaattggtatcaacacatctgtactatccactactgcttcaagttccatgggacaaactaaaagtacaagctcaggtggaggaaatcgaaaatgtaatcaggaacaaagcaaaaaccagcctttggatgctagagttgacaaaatcaaagataagaaaccaaggaagaaagcaatggaaagttctagcaacagtgatagtgattcaggcacatcatcagacacctcaagtgaaggcattagtagcagtgattcagatgatctagaagaagatgaagaagaagaagatcaaagtattgaagaaagtgaagatgatgattctgattcagagagtgaagcacaacataaaagtaacaaccaggtgctattacatggtatttcagacccaaaagcagatggacagaaagcaactgaaaaagcccaggaaaaaagaatacaccagccattacctcttgcgtctgaatcccagactcactcattccaatcccagcagaagcagcctcaggttttgtcacagcagcttccatttattttccaaagctctcaggcaaaggaggaatctgtgaacaaacacaccagtgtaatacagtctacgggattggtgtccaatgtgaaacctttatctttggtaaatcaagccaaaaaggaaacttacatgaaactcatagttccttctcctgatgttcttaaagcagggaataaaaatacctctgaagaatctagtttattgaccagtgaattgagatccaaacgggaacaatataaacaggcattcccatcacagttaaagaaacaagagtcatcgaagagcctgaagaaggttattgcagctttgtcaaatccaaaagcaacctctagttcaccagcacatccaaaacaaacattagaaaacaaccacccaaatccattcttgacaaatgcacttttaggtaatcaccaaccaaatggagttattcaaagtgtcattcaagaagctcctctagcacttactaccaaaactaaaatgcagagcaagattaatgaaaacattgctgctgcaagtagcacccctttttcctcacctgtaaatctgagtacaagtgggagaagaacccctggcaatcagacacctgtaatgccctctgcctctcccatcctgcatagtcaagggaaggaaaaagcagttagcaataatgtaaacccagtaaaaacacagcatcactcccatcctgcaaaatctttagtggaacaattcagaggaacagattcagacattcccagtagtaaagattctgaagattcaaatgaggatgaagaggaagatgatgaagaagaagatgaggaagatgatgaagatgatgaatctgatgacagccaatcagaatcagatagtaattcagaatcagatacagaaggatcagaagaagaagatgatgatgataaagaccaagatgaatcagatagtgatactgaaggagagaaaacttcaatgaaactgaataaaacaacttcctctgtcaaaagcccttccatgagtctcacaggtcactcaacacctcgtaacctccacatagcaaaagccccaggctctgctcctgctgccttatgttctgaatcccagtcacctgcttttcttggtacatcttcttccacacttacttcaagcccacactctggcacttccaaaagaagaagagtaacagatgaacgtgaactgcgtattccattggaatatggctggcagagagagacaagaataagaaactttggagggcgccttcaaggagaagtagcatattatgctccatgtggaaagaaacttaggcagtaccctgaagtaataaagtatctcagcagaaatggaataatggatatctcaagggacaatttcagcttcagtgcaaaaataagagtgggtgacttctatgaagccagagatggaccgcagggaatgcagtggtgtcttttgaaagaagaggatgtcattcctcgtatcagggcaatggaaggtcgtagaggaagaccaccaaatccagatagacaacgagcaagagaggaatccaggatgagacgtcggaaaggtcgacctccaaatgttggcaatgctgaattcctagataacgcagatgcaaagttgctaagaaaactgcaagctcaagaaatagccaggcaagcagcacaaataaagcttttgagaaaacttcaaaagcaggaacaggctcgggttgctaaagaagccaaaaaacaacaagcaataatggctgctgaggagaagcggaagcaaaaagaacagataaagattatgaaacagcaggaaaaaattaagagaatacagcaaatcagaatggaaaaagaacttcgagctcagcaaattctagaggctaaaaagaaaaagaaggaagaagcggcaaatgccaaattattggaggccgagaaacgaataaaggaaaaagaaatgagaagacaacaagctgttcttctgaaacatcaggaacgagagcgaaggcgacaacacatgatgcttatgaaagctatggaagctcgtaaaaaagcagaagaaaaagagcggttgaaacaagaaaaacgtgatgagaaaagattaaataaagagcgtaaactagagcagcgaagattagaattagaaatggcaaaggaactaaagaagcctaatgaagacatgtgcttagcagaccaaaagcctttgccagagttgcctcgtattccaggacttgttctctctggaagtacattttcagactgtctcatggtggtgcagttcttacgaaactttggtaaagttttgggctttgatgtgaatattgatgttccaaacctgagtgttcttcaagagggattgctaaatataggggacagcatgggtgaagtacaagacttgcttgtgaggctcctctcagctgctgtatgtgatccaggtctaataacaggatacaaggctaaaacagctcttggagaacatttgctgaatgttggtgtgaatcgagacaatgtttccgagattttacagatatttatggaagcccactgtggacaaactgagcttactgaaagtctgaagaccaaagcttttcaggctcacactccagcacagaaagcttcagtcctggctttcctgatcaatgaactggcatgcagcaagagtgtggtcagtgaaatcgacaagaacattgattatatgtcaaacttgaggagagataaatgggtggtagaaggtaaactccgcaagctcagaatcattcatgctaagaaaacaggcaaaagagacacttcaggtggcattgatctgggagaagagcagcatcccttgggcacacccactccaggacgcaagcgaagaaggaagggaggagacagtgattatgacgatgatgatgacgatgacagtgatgaccaaggggatgaagatgatgaggatgaagaagataaagaagacaaaaaaggaaaaaagactgatatctgtgaagatgaggatgaaggtgaccaagcagcaagtgttgaagagctggaaaaacagattgaaaaactgagtaaacaacagagtcagtacagaaggaagctctttgatgcgtctcactcattgcgttcagtgatgtttggccaagatcgttacagacgccggtactggattcttccccaatgtggggggatttttgtagaaggcatggagagtggtgaaggactagaagaaattgcaaaagaaagagaaaaactgaaaaaggcagaaagtgtccagatcaaagaagaaatgtttgagacttctggggacagtttaaattgttcaaatacagatcactgtgaacaaaaggaagatcttaaagaaaaagataacacaaatctattccttcagaaacctggctctttttccaaattaagcaagcttttggaagtagctaagatgcctcctgagtcagaggttatgacccccaaaccaaatgctggtgcaaatgggtgcacgttgtcttatcagaacagtggaaaacattcactgggcagcgttcagtcaacagcaacgcaaagcaatgtggaaaaggcagactctaataatctgtttaatactggttcaagtggtccagggaagttctacagtcctctccccaatgaccagttactaaaaacgctgactgaaaagaatagacaatggtttagtcttttgccacgaacaccctgtgatgacacttcacttactcatgccgatatgtcaactgcttctttggtgactcctcagtctcagccaccatctaagtcaccttcacctaccccagctcctcttggatcttctgctcagaatcctgttggcttaaatccatttgctttatcacctcttcaggtgaaaggtggagtatctatgatgggacttcagttttgtggatggcccactggtgtggttacttctaatattccatttacatcatctgtacctagtctaggatcggggttagggttatcagaaggaaatggtaattcattcttgacttccaatgttgcttcaagtaaaagtgaatctccagtaccacagaatgaaaaggccacttcagctcaacctgcagctgttgaagtagcaaaaccagtagattttcctagtccaaaacctattccagaagaaatgcagtttggttggtggagaattattgacccagaggacctaaaagctttgctcaaagtgctgcatctcagaggaataagagaaaaggcattacaaaaacaaattcagaaacatttggattatattactcaagcctgcctcaagaataaggatgttgctattattgaactgaatgaaaatgaagaaaaccaagtaactcgagatattgtggagaactggtcagtagaagaacaagcaatggaaatggatttgagtgtccttcaacaggtagaagatctagaaaggagagttgcatcagcaagtttgcaagtgaagggttggatgtgtccagagcctgcatcagaaagggaggacttggtatattttgaacataaatcatttactaaattgtgcaaggagcatgatggagaatttactggcgaagacgaaagcagtgcacatgcactagaacggaagagtgacaaccccctagatatagctgtaaccaggctggctgatttggagcggaacattgaaagaagaattgaagaggatattgctccagggctcagggtatggagaagggcattatcagaagctcgcagtgctgcacaggtagctctgtgcattcagcaattacagaaatcaatagcatgggaaaaatcaattatgaaagtttactgccaaatctgtcgaaagggagataatgaagaactgcttcttctttgtgatggctgtgacaaaggctgtcatacctactgccatagacccaagattacaacaatcccagatggagactggttttgtccagcttgcattgctaaggcaagtggtcaaactctaaaaatcaaaaaacttcatgtcaaaggaaaaaagactaatgagtcaaagaaaggcaagaaggtaactttaacaggagatactgaagatgaagactctgcatctacaagtagttcactaaaaagaggaaacaaagacctcaagaaaagaaaaatggaggaaaacacttctattaacttgtcaaaacaagaaagttttacttcagttaagaaacctaaaagagatgactccaaggacctagctctttgcagtatgattctgactgaaatggaaactcatgaggatgcatggccttttctacttcctgtaaacttgaaacttgttcctggttataagaaagttattaagaagcctatggatttttccacaattagagagaaactaagtagtggacagtatccaaaccttgaaacctttgctctagatgtcaggcttgtttttgacaactgtgaaacatttaatgaagatgattctgatataggcagagctggccacaatatgaggaagtattttgaaaaaaagtggacagatactttcaaagtgagctgaagttataataatctctttatttttttccttctaaacaaggacaaatgagaccagcaatgtgaactgtatttacataaacgtgcaaggcacatacataatgactttctttttccttaagtataaaaaaaaagtatcagaagaatgataccatttttaaaggcttcattcctacaacaaccaaggccctcggttattggtttgtgtgatttatcagctaatttaggtagaacagggaagcacacccaaagaattttcaaaggaaagggtgttatagtgcaatagcaattaaaatatatcaaatcgcactgaatactcaacaccagagctctaatgtgggaaatggttctcctttccctctcaataaatatctatttttcatttttttactttgtagtttattttttagtgaatgtatttaattttatgaattatttatgattaaaccacatccagaatcttcgttttctgtgaaaaggaagaactagaaaattgctttaaatcttgaaaatacaaggaatgttttaaaatataaaacaaagccaagttaaactgtttacactgatgtgctataaaagcaccaaaaagaaactttactgtagagttacaagtacatttatatatatatgttgctgcatcacttgtgtagttaaattgtatttcaaaacagtgaaaaaattgacatgtatatactgttcattcttgtttatattaagtcttgttttaaatatgtattatgtgtatatattgtttgcagacattattgttcatgccttagaggattgtagcattttattttcgtctgaaggtaatgatagctatacagtctgtacagtaattatcctctaccaacactgtggcgtctccttaatcttggtagtgcctgcctttgaaacagggtgtaggggatattagttttccatttttctattttgttatataattttaagccaccagggcctaaattaaagtataatcatttgtatccatgtggaataaaattgtgacaatttcctacgcacacagtattttttcatagaaacatttccctcccatttgccttgcctcagaaataaatttaaaagacgtttgtaaccactgtgttttatctactgtgtgttgtggtggcctgttggaggcaaatagatcagattttttttgtacctacgtaagagtacttgaagttttatttaaaataaaatgttgtggaaaaggtagcattctttttttaggagtgttatttttcactatgtgtggcacggatacaataaaagacttttacaaactaa

SEQ ID NO: 60 - protein, 2036 aa, Human
  GARNL1
MFSKKPHGDVKKSTQKVLDTKKDALTRLKHLRIVIENAESIDLKQFFDQHFSHIYYVFFENFVTIEASLKQKGHKSQREELDAILFIFEKILQLLPERIHQRWQFHSIGLILKKLLHTGNSLKIRREGVRLFLLWLQALQNNCSKEQLWMFSCLIPGFSAPQSEHGPRTLDNLINPPLNLQETQVTIEEITPLVPPQSGDKGQEDLTSYFLEALLKYIVIQVKSLEWKNKENQERGFSFLFSHFKKYYLPYIFPNICKENSLYHPILDIPQMRPKPHYVVIKKDAETNEAIYCTKEPFIKARVIVIRWLVSFWLEPKPHTGPHIPGMEGEVLPKNIQRAAASLVSREESKNDNADKTDRTTEPEQSHSNTSTLTEREPSSSSLCSIDEEHLTDIEIVRRVFSSKRSNVNFVTEIFRQAFLLPICEAAAMRKVVKVYQEWIQQEEKPLFMQEPEEIVITSSDLPCIENVTDHDISMEEGEKREEENGTNTADHVRNSSWAKNGSYQGALHNASEEATEQNIRAGTQAVLQVFIINSSNIFLLEPANEIKNLLDEHTDMCKRILNIYRYMVVQVSMDKKTWEQMLLVLLRVTESVLKMPSQAFLQFQGKKNMTLAGRLAGPLFQTLIVAWIKANLNVYISRELWDDLLSVLSSLTYWEELATEWSLTMETLTKVLARNLYSLDLSDLPLDKLSEQKQKKHKGKGVGHEFQKVSVDKSFSRGWSRDQPGQAPMRQRSATTTGSPGTEKARSIVRQKTVDIDDAQILPRSTRVRHFSQSEETGNEVFGALNEEQPLPRSSSTSDILEPFTVERAKVNKEDMSQKLPPLNSDIGGSSANVPDLMDEFIAERLRSGNASTMTRRGSSPGSLEIPKDLPDILNKQNQMRPIDDPGVPSEWTSPASAGSSDLISSDSHSDSFSAFQYDGRKFDNFGFGTDTGVTSSADVDSGSGHHQSAEEQEVASLTTLHIDSETSSLNQQAFSAEVATITGSESASPVHSPLGSRSQTPSPSTLNIDHMEQKDLQLDEKLHHSVLQTPDDLEISEFPSECCSVMAGGTLTGWHADVATVMWRRMLGILGDVNSIMDPEIHAQVFDYLCELWQNLAKIRDNLGISTDNLTSPSPPVLIPPLRILTPWLFKATMLTDKYKQGKLHAYKLICNTMKRRQDVSPNRDFLTHFYNIMHCGLLHIDQDIVNTIIKHCSPQFFSLGLPGATMLIMDFIVAAGRVASSAFLNAPRVEAQVLLGSLVCFPNLYCELPSLHPNIPDVAVSQFTDVKELIIKTVLSSARDEPSGPARCVALCSLGIWICEELVHESHHPQIKEALNVICVSLKFTNKTVAHVACNMLHMLVHYVPRLQIYQPDSPLKIIQILIATITHLLPSTEASSYEMDKRLVVSLLLCLLDWIMALPLKTLLQPFHATGAESDKTEKSVLNCIYKVLHGCVYGAQCFSNPRYFPMSLSDLASVDYDPFMHLESLKEPEPLHSPDSERSSKLQPVTEVKTQMQHGLISIAARTVITHLVNHLGHYPMSGGPAMLTSQVCENHDNHYSESTELSPELFESPNIQFFVLNNTTLVSCIQIRSEENMPGGGLSAGLASANSNVRIIVRDLSGKYSWDSAILYGPPPVSGLSEPTSFMLSLSHQEKPEEPPTSNECLEDITVKDGLSLQFKRFRETVPTWDTIRDEEDVLDELLQYLGVTSPECLQRTGISLNIPAPQPVCISEKQENDVINAILKQHTEEKEFVEKHFNDLNMKAVEQDEPIPQKPQSAFYYCRLLLSILGMNSWDKRRSFHLLKKNEKLLRELRNLDSRQCRETHKIAVFYVAEGQEDKHSILTNTGGSQAYEDFVAGLGWEVNLTNHCGFMGGLQKNKSTGLTTPYFATSTVEVIFHVSTRMPSDSDDSLTKKLRHLGNDEVHIVWSEHTRDYRRGIIPTEFGDVLIVIYPMKNHMFSIQIMKKPEVPFFGPLFDGAIVNGKVLPIMVRATAINASRALKSLIPLYQNFYEERARYLQTIVQHHLEPTTFEDFAAQVFSPAPYHHLPSDADH

SEQ ID NO: 61 - protein, 2083 aa, Human
  GARNL1
MFSKKPHGDVKKSTQKVLDTKKDALTRLKHLRIVIENAESIDLKQFFDQHFSHIYYVFFENFVTIEASLKQKGHKSQREELDAILFIFEKILQLLPERIHQRWQFHSIGLILKKLLHTGNSLKIRREGVRLFLLWLQALQNNCSKEQLWMFSCLIPGFSAPQSEHGPRTLDNLINPPLNLQETQVTIEEITPLVPPQSGDKGQEDLTSYFLEALLKYIVIQVKSLEWKNKENQERGFSFLFSHFKKYYLPYIFPNICKENSLYHPILDIPQMRPKPHYVVIKKDAETNEAIYCTKEPFIKARVIVIRWLVSFWLEPKPHTGPHIPGMEGEVLPKNIQRAAASLVSREESKNDNADKTDRTTEPEQSHSNTSTLTEREPSSSSLCSIDEEHLTDIEIVRRVFSSKRSNVNFVTEIFRQAFLLPICEAAAMRKVVKVYQEWIQQEEKPLFMQEPEEIVITSSDLPCIENVTDHDISMEEGEKREEENGTNTADHVRNSSWAKNGSYQGALHNASEEATEQNIRAGTQAVLQVFIINSSNIFLLEPANEIKNLLDEHTDMCKRILNIYRYMVVQVSMDKKTWEQMLLVLLRVTESVLKMPSQAFLQFQGKKNMTLAGRLAGPLFQTLIVAWIKANLNVYISRELWDDLLSVLSSLTYWEELATEWSLTMETLTKVLARNLYSLDLSDLPLDKLSEQKQKKHKGKGVGHEFQKVSVDKSFSRGWSRDQPGQAPMRQRSATTTGSPGTEKARSIVRQKTVDIDDAQILPRSTRVRHFSQSEETGNEVFGALNEEQPLPRSSSTSDILEPFTVERAKVNKEDMSQKLPPLNSDIGGSSANVPDLMDEFIAERLRSGNASTMTRRGSSPGSLEIPKDLPDILNKQNQMRPIDDPGVPSEWTSPASAGSSDLISSDSHSDSFSAFQYDGRKFDNFGFGTDTGVTSSADVDSGSGHHQSAEEQEVASLTTLHIDSETSSLNQQAFSAEVATITGSESASPVHSPLGSRSQTPSPSTLNIDHMEQKDLQLDEKLHHSVLQTPDDLEISEFPSECCSVMAGGTLTGWHADVATVMWRRMLGILGDVNSIMDPEIHAQVFDYLCELWQNLAKIRDNLGISTDNLTSPSPPVLIPPLRILTPWLFKATMLTDKYKQGKLHAYKLICNTMKRRQDVSPNRDFLTHFYNIMHCGLLHIDQDIVNTIIKHCSPQFFSLGLPGATMLIMDFIVAAGRVASSAFLNAPRVEAQVLLGSLVCFPNLYCELPSLHPNIPDVAVSQFTDVKELIIKTVLSSARDEPSGPARCVALCSLGIWICEELVHESHHPQIKEALNVICVSLKFTNKTVAHVACNMLHMLVHYVPRLQIYQPDSPLKIIQILIATITHLLPSTEASSYEMDKRLVVSLLLCLLDWIMALPLKTLLQPFHATGAESDKTEKSVLNCIYKVLHGCVYGAQCFSNPRYFPMSLSDLASVDYDPFMHLESLKEPEPLHSPDSERSSKLQPVTEVKTQMQHGLISIAARTVITHLVNHLGHYPMSGGPAMLTSQVCENHDNHYSESTELSPELFESPNIQFFVLNNTTLVSCIQIRSEENMPGGGLSAGLASANSNVRIIVRDLSGKYSWDSAILYGPPPVSGLSEPTSFMLSLSHQEKPEEPPTSNECLEDITVKDGLSLQFKRFRETVPTWDTIRDEEDVLDELLQYLGVTSPECLQRTGISLNIPAPQPVCISEKQENDVINAILKQHTEEKEFVEKHFNDLNMKAVEQDEPIPQKPQSAFYYCRLLLSILGMNSWDKRRSFHLLKKNEKLLRELRNLDSRQCRETHKIAVFYVAEGQEDKHSILTNTGGSQAYEDFVAGLGWEVNLTNHCGFMGGLQKNKSTGLTTPYFATSTVEVIFHVSTRMPSDSDDSLTKKLRHLGNDEVHIVWSEHTRDYRRGIIPTEFGDVLIVIYPMKNHMFSIQIMKKPEVPFFGPLFDGAIVNGKVLPIMVRATAINASRALKSLIPLYQNFYEERARYLQTIVQHHLEPTTFEDFAAQVFSPAPYHHLPSDAGSYPEILPSETPTATQVDGADLASPMSPRTSKSRMSMKLRRSSGSANKS

SEQ ID NO: 62 - DNA, 7882 bp, Human
  GARNL1
agggagagagttgtgctcctgccgccgagagctccaccttcgtggctctgggtccggggccccggcctgtggcggcgagcggcggccgctggagacgagcggcggcggcaggcggccagcccgggtctgcctcgctccgtgcagggccgggagagggatccgccatattggagctggggccgaaggtgccttggagccgcggcgcgaggcgggtggaggtggcggccctggcctggatcgggaaggagtcggctctgccctggcccgcaaggctggggagctaatgagcctctctggctagtctcctccccgtccactccctccactttctgccgccgggacccggctgggagccggctgtggcagtggcagtggcagtggcagcgacaggatgttctccaagaagccgcacggggacgtgaagaagtccacccagaaggtgctagacaccaagaaggacgcactgactcgcctcaagcacctgcgcatcgtcatcgagaatgcagaatctattgatcttaaacagtttttcgaccaacatttttcacatatatactatgtgttctttgaaaattttgtgactattgaagctagtcttaaacagaaaggtcacaagtctcaaagagaggaattggatgctatactttttatttttgagaaaattttacaacttcttccagaaagaattcatcagcgatggcagtttcatagtattggattgattttaaagaagctacttcacacaggaaactccttaaagattaggcgggaaggtgttcgtcttttcttactatggttgcaagctcttcagaataactgtagcaaagaacagctctggatgttttcatgcttaatccctggattttcagcaccacagtctgaacatggacctcgaactttagataatctcattaatcctccactcaaccttcaagaaactcaagtcactatagaagaaatcactcctcttgtccccccacaatcaggagataaagggcaagaagatctcacaagctattttcttgaagcacttctaaaatacatagtcattcaggtaaaaagtttagaatggaagaacaaagaaaaccaagaaaggggattttcatttttgttttcacattttaagaaatattacttgccttatatttttccaaacatctgtaaggaaaacagtttatatcatcctatacttgacatcccgcagatgagaccaaagccacattatgtcgtgataaagaaagatgctgaaaccaatgaagcaatctattgtacaaaggagcctttcattaaggctcgtgttattgtcattcgttggctggtttctttctggctggagccaaaaccacatacaggacctcatattcctgggatggaaggtgaagtcttgccaaagaatattcagagagcagctgctagtttagtatccagagaagaaagcaaaaatgataatgctgataaaacagacagaactacagaacccgaacagtctcattccaatacaagcactctcacggagcgagaacctagctcatctagtctctgtagtattgatgaagaacatctcacagacattgaaatagttcgcagagttttttcttctaaaaggagtaatgtaaactttgtgacagagatatttcgtcaggcatttttattaccaatttgtgaagcagcagctatgagaaaagtggtaaaagtatatcaagaatggatccaacaagaggaaaaacctttgttcatgcaagagcctgaagaaattgtgatcacttcttcagacctcccttgcattgaaaatgtcacagaccatgatatttcaatggaagaaggagaaaaaagagaagaggaaaatgggaccaatactgctgatcatgttcgaaattccagttgggcaaaaaacggctcctaccaaggtgctcttcataacgcctctgaagaagccacagaacaaaacatacgagctggtacccaggcagttttgcaggtgtttattataaactcatcaaatatatttcttcttgaacctgcaaatgaaataaaaaatcttctggatgaacacacagatatgtgtaaacgcattcttaacatttatcggtacatggttgtacaagtatcaatggacaaaaagacttgggaacagatgctgcttgtgttgctcagagtcacggaatctgtactgaagatgccatcacaagcttttctacagttccaagggaaaaaaaatatgaccttggcaggtcgacttgcaggaccacttttccagacccttatagttgcctggatcaaagcaaacctaaatgtgtacatctcccgagaactttgggatgacttactgtcagtattgtcatcgctgacctattgggaagagttggccactgagtggtcactgactatggagacattaactaaagttttagctaggaatttatatagtttggatctcagtgatttaccattggataagctgagtgaacagaaacaaaaaaagcacaaagggaaaggagttggacatgaatttcagaaagtttcagttgacaagtcattttctagaggatggagtcgtgatcagcctggccaagccccaatgagacagaggagtgcaacaaccactggttctccaggaaccgaaaaggcgaggagtatagtacggcaaaaaactgtcgatattgatgatgctcaaatacttccccgctcaactagagtcagacatttttcacaaagtgaagaaactggaaatgaagtttttggtgctttgaatgaggagcagccattgcctcgaagtagcagcacttctgacatcttggaaccattcactgttgaacgagccaaagtcaataaagaggacatgagccaaaaactgcctcctcttaatagtgatattggcggcagcagtgctaatgttcctgatctgatggatgagtttatagcagaacgacttcgaagtggtaatgcctcgactatgacaagaagaggaagtagtccaggcagcctggaaattcccaaagacctccctgatattctaaacaagcagaaccagatgcgccctattgatgacccaggtgtgccctcagaatggacttctcctgccagtgcagggagcagtgatcttatcagctcagatagtcattcggattctttcagcgctttccaatatgatggccgaaaatttgacaattttggctttggaaccgacactggggttacgtcctctgctgatgtggattcaggttctggccatcatcagagtgctgaagagcaggaagtggctagtctaactactcttcatatagattctgaaacaagcagtcttaatcagcaagctttctctgctgaagttgcaactattactggttcagaaagtgcttccccagtccactcacctctgggctccaggtcacagactccttccccttctacattgaatatagatcacatggaacagaaggatctgcagctcgacgagaagctccaccactctgttcttcagacaccagatgatctagaaattagtgaatttccatcagaatgttgtagtgtgatggcaggaggtactctgactggatggcatgctgatgttgctactgtaatgtggcgaagaatgctaggcattttgggagatgtaaattcaatcatggatcctgaaatacatgctcaagtttttgattacctctgtgaactttggcagaatctagctaagattagagataaccttggcatttcaactgataacctgacctccccttctccaccagttttaattcctccactgagaattcttacaccttggctttttaaggcaaccatgttgactgataaatataaacaaggtaaattacatgcatataaacttatttgtaatacaatgaaaagaagacaagatgtttctccaaatagagattttctaacacatttctacaatataatgcattgtggattacttcatattgaccaggatattgtcaatacaatcatcaaacactgctcacctcaatttttttcacttggtttgcctggtgccacaatgcttattatggattttattgtagcagctggtagagtggcttcttcagcttttctcaatgcaccaagagtagaagcacaagttcttctgggatctttggtttgctttcccaacttatattgtgaactgccttctcttcatcccaacattcctgatgttgctgtgtctcagtttacagatgttaaggaacttataatcaaaactgtattaagctcggcaagagatgagccctctggtcctgcacgatgtgtagcactttgtagtttaggtatttggatttgtgaagaactagtccatgagtctcatcatcctcaaattaaggaagctctgaatgtgatttgtgtttccttaaagtttactaataaaacagtagcccacgtagcttgtaacatgcttcacatgctggttcattatgtacctagacttcagatttaccagcctgattctcccttgaaaattattcaaatcctaatagctaccatcacccatcttttaccaagtacagaggcttcatcttatgaaatggacaagaggttggtagtatctttacttctctgccttctggactggatcatggccttacctctaaagacactgctccaaccatttcatgctacgggagcagaaagcgataaaacagaaaaatctgttctcaattgcatttataaggttttacatgggtgtgtttatggagctcagtgttttagcaatccaaggtattttcccatgagcctctctgatttggcatctgtagattatgatccttttatgcatttggaaagtctgaaagagcctgagcctctgcactctcctgactcagaacgatcttctaaactccagccagtaacagaagtgaaaactcaaatgcagcatggattaatctctatagcagcccgcactgttattacacatctggtaaatcacctgggccattatccaatgagcggtggtcctgctatgctaacaagtcaggtgtgtgaaaatcacgacaatcattacagtgaaagtactgaactttctcctgaactctttgagagtccaaatatccagttctttgtgttaaataatacaaccttagtgtcctgtatccagatcagatcagaagagaatatgcctggaggaggtttatctgctggccttgcatcagccaattcaaatgtcagaatcatagtacgtgatctctctggaaaatattcatgggattctgctatactgtatggcccacctcctgtaagtggcttgtcagaacctacatctttcatgctttcattgtctcaccaagagaagccagaagagcctccgacatctaatgaatgcttagaagatataaccgtaaaagatggactttctctccagtttaaaagatttagagaaactgtaccaacttgggatacaataagagatgaagaagatgttcttgatgagctcttgcagtatttgggtgttactagtcctgaatgcttacagagaactggaatctcacttaatattcctgctccacaacctgtgtgcatttctgaaaaacaagaaaatgatgttattaatgctatccttaagcaacatacagaagaaaaagaatttgttgagaagcactttaatgacttaaacatgaaagctgtggaacaagatgaaccaatacctcaaaaacctcagtcagcattttattattgcagattgcttcttagtatattgggaatgaattcctgggacaaacggaggagctttcatctcctgaagaaaaatgaaaagctacttagagaacttaggaacttggattcaaggcagtgccgagagacacacaagattgcagtattttatgttgctgaaggacaagaagacaaacactccattctcaccaatacaggaggaagtcaagcatatgaagattttgtagctggtcttggttgggaggtaaatcttacaaaccattgtggttttatgggaggactacaaaaaaacaaaagcactggattgaccactccatattttgctacctctacagtagaggtaatatttcacgtgtcaacaagaatgccttctgattctgatgattctttgaccaaaaaattgagacatttgggaaatgatgaagtgcacattgtttggtcagagcatactagagactacaggagaggaattattcccacagaatttggtgatgtccttattgtaatatatccaatgaaaaatcacatgttcagtattcagataatgaaaaaaccagaggttcccttctttggtcccctttttgatggtgctattgtgaatggaaaggttctacccattatggttagagcaacagctataaatgcaagccgtgctctgaaatctctgattccattgtatcaaaacttctatgaggagagagcacgatacctgcaaacaattgtccagcaccacttagaaccaacaacatttgaagattttgcagcacaggttttttctccagctccctaccaccatttaccatctgatgccgatcattaaatatcagttctgtttatctgaaggctcctacccagagattctacccagtgaaactcccacagcaacgcaggtagatggggctgacctggcctctccaatgtctcctcgaactagcaaaagccgcatgtccatgaagctgcgtcgttcctctggctcagccaataaatcctaaggagacaagcagcccagcagtgatcagcagtagccaccttagcacgaacatagggttaaccctttcaggccttcatgtctgccataacatgcatgtttcttcctgtacatttatttgagaaaacactggatttaaataattttaaataatttgtagcttaatattaaagatttaagttatttattgtttcattttttttcccacaatccaagctgccatattttgagggcagggggagttttattctacaccctttaccttcctagataattatgtctaagtagttttatctttaatttcatggttaactgtgagccaaaatacaattggacaattagtctcattatttattgtgccccattgcaactttatggttcaataaatatataattttttacaaatgtaaaattttacatttaagcatttgtaaagttacagcaaaagatgtacctgttaatacacagaatgtgtacagattatttgttatgacaataaaacactcaaaataaatggtctttagcatctcaaattccaactgaaatcattttagtattaactcttcttcccaaagcaatgtctcatttcttggctgtgcaggtgatgccatgttatatccaataactagaaaaatcactgtgctgaacttttatgtttagcttccaagtatttttctaatgttttgcatttcaagtggtatcactgttaaatgccatttgttttcagattgtggccttttattattggctgctagatcctggtgtttctatgttcttttttaagcaccaaaaagaagatggggaagaaaagaaggaaaattttctgatataaatatgttgttcaaattatgagtattatttaaaaaagaaaaaggaacataacccaggagtctaagttaaatctaatattgttaatactgaacttgcaggtccaggttggtatacattccaccctctagaagtattttcttacagtagataagctgctcacattttgttttgaatgggcatctcctgaggaaatgtagcatgacattggtactaactgcatgtgtaaatacatcatactggcaaaccgtaaaatataaattatgtatcatcattcatgtagtatctataatttgtaacagtgggggggaaagatgacatggtatttaataatacaataaaaatattcttatcacttcctatccaaaaaaaaaaaaaaaaaaa

SEQ ID NO: 63 - DNA, 7851 bp, Human
  GARML1
agggagagagttgtgctcctgccgccgagagctccaccttcgtggctctgggtccggggccccggcctgtggcggcgagcggcggccgctggagacgagcggcggcggcaggcggccagcccgggtctgcctcgctccgtgcagggccgggagagggatccgccatattggagctggggccgaaggtgccttggagccgcggcgcgaggcgggtggaggtggcggccctggcctggatcgggaaggagtcggctctgccctggcccgcaaggctggggagctaatgagcctctctggctagtctcctccccgtccactccctccactttctgccgccgggacccggctgggagccggctgtggcagtggcagtggcagtggcagcgacaggatgttctccaagaagccgcacggggacgtgaagaagtccacccagaaggtgctagacaccaagaaggacgcactgactcgcctcaagcacctgcgcatcgtcatcgagaatgcagaatctattgatcttaaacagtttttcgaccaacatttttcacatatatactatgtgttctttgaaaattttgtgactattgaagctagtcttaaacagaaaggtcacaagtctcaaagagaggaattggatgctatactttttatttttgagaaaattttacaacttcttccagaaagaattcatcagcgatggcagtttcatagtattggattgattttaaagaagctacttcacacaggaaactccttaaagattaggcgggaaggtgttcgtcttttcttactatggttgcaagctcttcagaataactgtagcaaagaacagctctggatgttttcatgcttaatccctggattttcagcaccacagtctgaacatggacctcgaactttagataatctcattaatcctccactcaaccttcaagaaactcaagtcactatagaagaaatcactcctcttgtccccccacaatcaggagataaagggcaagaagatctcacaagctattttcttgaagcacttctaaaatacatagtcattcaggtaaaaagtttagaatggaagaacaaagaaaaccaagaaaggggattttcatttttgttttcacattttaagaaatattacttgccttatatttttccaaacatctgtaaggaaaacagtttatatcatcctatacttgacatcccgcagatgagaccaaagccacattatgtcgtgataaagaaagatgctgaaaccaatgaagcaatctattgtacaaaggagcctttcattaaggctcgtgttattgtcattcgttggctggtttctttctggctggagccaaaaccacatacaggacctcatattcctgggatggaaggtgaagtcttgccaaagaatattcagagagcagctgctagtttagtatccagagaagaaagcaaaaatgataatgctgataaaacagacagaactacagaacccgaacagtctcattccaatacaagcactctcacggagcgagaacctagctcatctagtctctgtagtattgatgaagaacatctcacagacattgaaatagttcgcagagttttttcttctaaaaggagtaatgtaaactttgtgacagagatatttcgtcaggcatttttattaccaatttgtgaagcagcagctatgagaaaagtggtaaaagtatatcaagaatggatccaacaagaggaaaaacctttgttcatgcaagagcctgaagaaattgtgatcacttcttcagacctcccttgcattgaaaatgtcacagaccatgatatttcaatggaagaaggagaaaaaagagaagaggaaaatgggaccaatactgctgatcatgttcgaaattccagttgggcaaaaaacggctcctaccaaggtgctcttcataacgcctctgaagaagccacagaacaaaacatacgagctggtacccaggcagttttgcaggtgtttattataaactcatcaaatatatttcttcttgaacctgcaaatgaaataaaaaatcttctggatgaacacacagatatgtgtaaacgcattcttaacatttatcggtacatggttgtacaagtatcaatggacaaaaagacttgggaacagatgctgcttgtgttgctcagagtcacggaatctgtactgaagatgccatcacaagcttttctacagttccaagggaaaaaaaatatgaccttggcaggtcgacttgcaggaccacttttccagacccttatagttgcctggatcaaagcaaacctaaatgtgtacatctcccgagaactttgggatgacttactgtcagtattgtcatcgctgacctattgggaagagttggccactgagtggtcactgactatggagacattaactaaagttttagctaggaatttatatagtttggatctcagtgatttaccattggataagctgagtgaacagaaacaaaaaaagcacaaagggaaaggagttggacatgaatttcagaaagtttcagttgacaagtcattttctagaggatggagtcgtgatcagcctggccaagccccaatgagacagaggagtgcaacaaccactggttctccaggaaccgaaaaggcgaggagtatagtacggcaaaaaactgtcgatattgatgatgctcaaatacttccccgctcaactagagtcagacatttttcacaaagtgaagaaactggaaatgaagtttttggtgctttgaatgaggagcagccattgcctcgaagtagcagcacttctgacatcttggaaccattcactgttgaacgagccaaagtcaataaagaggacatgagccaaaaactgcctcctcttaatagtgatattggcggcagcagtgctaatgttcctgatctgatggatgagtttatagcagaacgacttcgaagtggtaatgcctcgactatgacaagaagaggaagtagtccaggcagcctggaaattcccaaagacctccctgatattctaaacaagcagaaccagatgcgccctattgatgacccaggtgtgccctcagaatggacttctcctgccagtgcagggagcagtgatcttatcagctcagatagtcattcggattctttcagcgctttccaatatgatggccgaaaatttgacaattttggctttggaaccgacactggggttacgtcctctgctgatgtggattcaggttctggccatcatcagagtgctgaagagcaggaagtggctagtctaactactcttcatatagattctgaaacaagcagtcttaatcagcaagctttctctgctgaagttgcaactattactggttcagaaagtgcttccccagtccactcacctctgggctccaggtcacagactccttccccttctacattgaatatagatcacatggaacagaaggatctgcagctcgacgagaagctccaccactctgttcttcagacaccagatgatctagaaattagtgaatttccatcagaatgttgtagtgtgatggcaggaggtactctgactggatggcatgctgatgttgctactgtaatgtggcgaagaatgctaggcattttgggagatgtaaattcaatcatggatcctgaaatacatgctcaagtttttgattacctctgtgaactttggcagaatctagctaagattagagataaccttggcatttcaactgataacctgacctccccttctccaccagttttaattcctccactgagaattcttacaccttggctttttaaggcaaccatgttgactgataaatataaacaaggtaaattacatgcatataaacttatttgtaatacaatgaaaagaagacaagatgtttctccaaatagagattttctaacacatttctacaatataatgcattgtggattacttcatattgaccaggatattgtcaatacaatcatcaaacactgctcacctcaatttttttcacttggtttgcctggtgccacaatgcttattatggattttattgtagcagctggtagagtggcttcttcagcttttctcaatgcaccaagagtagaagcacaagttcttctgggatctttggtttgctttcccaacttatattgtgaactgccttctcttcatcccaacattcctgatgttgctgtgtctcagtttacagatgttaaggaacttataatcaaaactgtattaagctcggcaagagatgagccctctggtcctgcacgatgtgtagcactttgtagtttaggtatttggatttgtgaagaactagtccatgagtctcatcatcctcaaattaaggaagctctgaatgtgatttgtgtttccttaaagtttactaataaaacagtagcccacgtagcttgtaacatgcttcacatgctggttcattatgtacctagacttcagatttaccagcctgattctcccttgaaaattattcaaatcctaatagctaccatcacccatcttttaccaagtacagaggcttcatcttatgaaatggacaagaggttggtagtatctttacttctctgccttctggactggatcatggccttacctctaaagacactgctccaaccatttcatgctacgggagcagaaagcgataaaacagaaaaatctgttctcaattgcatttataaggttttacatgggtgtgtttatggagctcagtgttttagcaatccaaggtattttcccatgagcctctctgatttggcatctgtagattatgatccttttatgcatttggaaagtctgaaagagcctgagcctctgcactctcctgactcagaacgatcttctaaactccagccagtaacagaagtgaaaactcaaatgcagcatggattaatctctatagcagcccgcactgttattacacatctggtaaatcacctgggccattatccaatgagcggtggtcctgctatgctaacaagtcaggtgtgtgaaaatcacgacaatcattacagtgaaagtactgaactttctcctgaactctttgagagtccaaatatccagttctttgtgttaaataatacaaccttagtgtcctgtatccagatcagatcagaagagaatatgcctggaggaggtttatctgctggccttgcatcagccaattcaaatgtcagaatcatagtacgtgatctctctggaaaatattcatgggattctgctatactgtatggcccacctcctgtaagtggcttgtcagaacctacatctttcatgctttcattgtctcaccaagagaagccagaagagcctccgacatctaatgaatgcttagaagatataaccgtaaaagatggactttctctccagtttaaaagatttagagaaactgtaccaacttgggatacaataagagatgaagaagatgttcttgatgagctcttgcagtatttgggtgttactagtcctgaatgcttacagagaactggaatctcacttaatattcctgctccacaacctgtgtgcatttctgaaaaacaagaaaatgatgttattaatgctatccttaagcaacatacagaagaaaaagaatttgttgagaagcactttaatgacttaaacatgaaagctgtggaacaagatgaaccaatacctcaaaaacctcagtcagcattttattattgcagattgcttcttagtatattgggaatgaattcctgggacaaacggaggagctttcatctcctgaagaaaaatgaaaagctacttagagaacttaggaacttggattcaaggcagtgccgagagacacacaagattgcagtattttatgttgctgaaggacaagaagacaaacactccattctcaccaatacaggaggaagtcaagcatatgaagattttgtagctggtcttggttgggaggtaaatcttacaaaccattgtggttttatgggaggactacaaaaaaacaaaagcactggattgaccactccatattttgctacctctacagtagaggtaatatttcacgtgtcaacaagaatgccttctgattctgatgattctttgaccaaaaaattgagacatttgggaaatgatgaagtgcacattgtttggtcagagcatactagagactacaggagaggaattattcccacagaatttggtgatgtccttattgtaatatatccaatgaaaaatcacatgttcagtattcagataatgaaaaaaccagaggttcccttctttggtcccctttttgatggtgctattgtgaatggaaaggttctacccattatggttagagcaacagctataaatgcaagccgtgctctgaaatctctgattccattgtatcaaaacttctatgaggagagagcacgatacctgcaaacaattgtccagcaccacttagaaccaacaacatttgaagattttgcagcacaggttttttctccagctccctaccaccatttaccatctgatgccggctcctacccagagattctacccagtgaaactcccacagcaacgcaggtagatggggctgacctggcctctccaatgtctcctcgaactagcaaaagccgcatgtccatgaagctgcgtcgttcctctggctcagccaataaatcctaaggagacaagcagcccagcagtgatcagcagtagccaccttagcacgaacatagggttaaccctttcaggccttcatgtctgccataacatgcatgtttcttcctgtacatttatttgagaaaacactggatttaaataattttaaataatttgtagcttaatattaaagatttaagttatttattgtttcattttttttcccacaatccaagctgccatattttgagggcagggggagttttattctacaccctttaccttcctagataattatgtctaagtagttttatctttaatttcatggttaactgtgagccaaaatacaattggacaattagtctcattatttattgtgccccattgcaactttatggttcaataaatatataattttttacaaatgtaaaattttacatttaagcatttgtaaagttacagcaaaagatgtacctgttaatacacagaatgtgtacagattatttgttatgacaataaaacactcaaaataaatggtctttagcatctcaaattccaactgaaatcattttagtattaactcttcttcccaaagcaatgtctcatttcttggctgtgcaggtgatgccatgttatatccaataactagaaaaatcactgtgctgaacttttatgtttagcttccaagtatttttctaatgttttgcatttcaagtggtatcactgttaaatgccatttgttttcagattgtggccttttattattggctgctagatcctggtgtttctatgttcttttttaagcaccaaaaagaagatggggaagaaaagaaggaaaattttctgatataaatatgttgttcaaattatgagtattatttaaaaaagaaaaaggaacataacccaggagtctaagttaaatctaatattgttaatactgaacttgcaggtccaggttggtatacattccaccctctagaagtattttcttacagtagataagctgctcacattttgttttgaatgggcatctcctgaggaaatgtagcatgacattggtactaactgcatgtgtaaatacatcatactggcaaaccgtaaaatataaattatgtatcatcattcatgtagtatctataatttgtaacagtgggggggaaagatgacatggtatttaataatacaataaaaatattcttatcacttcctatccaaaaaaaaaaaaaaaaaaa

SEQ ID NO: 64 - protein, 391 aa, Human
  NAP1L1
MADIDNKEQSELDQDLDDVEEVEEEETGEETKLKARQLTVQMMQNPQILAALQERLDGLVETPTGYIESLPRVVKRRVNALKNLQVKCAQIEAKFYEEVHDLERKYAVLYQPLFDKRFEIINAIYEPTEEECEWKPDEEDEISEELKEKAKIEDEKKDEEKEDPKGIPEFWLTVFKNVDLLSDMVQEHDEPILKHLKDIKVKFSDAGQPMSFVLEFHFEPNEYFTNEVLTKTYRMRSEPDDSDPFSFDGPEIMGCTGCQIDWKKGKNVTLKTIKKKQKHKGRGTVRTVTKTVSNDSFFNFFAPPEVPESGDLDDDAEAILAADFEIGHFLRERIIPRSVLYFTGEAIEDDDDDYDEEGEEADEEGEEEGDEENDPDYDPKKDQNPAECKQQ

SEQ ID NO: 65 - protein, 391 aa, Human; identical to SEQ ID NO: 64
  NAP1L1

SEQ ID NO: 66 - DNA, 2908 bp, Human
  NAP1L1
ctgctcgcggcgccgcctcctgctcctcccgctgctgctgccgctgccgccctgagtcactgcctgcgcagctccggccgcctggctccccatactagtcgccgatatttggagttcttacaacatggcagacattgacaacaaagaacagtctgaacttgatcaagatttggatgatgttgaagaagtagaagaagaggaaactggtgaagaaacaaaactcaaagcacgtcagctaactgttcagatgatgcaaaatcctcagattcttgcagcccttcaagaaagacttgatggtctggtagaaacaccaacaggatacattgaaagcctgcctagggtagttaaaagacgagtgaatgctctcaaaaacctgcaagttaaatgtgcacagatagaagccaaattctatgaggaagttcacgatcttgaaaggaagtatgctgttctctatcagcctctatttgataagcgatttgaaattattaatgcaatttatgaacctacggaagaagaatgtgaatggaaaccagatgaagaagatgagatttcggaggaattgaaagaaaaggccaagattgaagatgagaaaaaggatgaagaaaaagaagaccccaaaggaattcctgaattttggttaactgtttttaagaatgttgacttgctcagtgatatggttcaggaacacgatgaacctattctgaagcacttgaaagatattaaagtgaagttctcagatgctggccagcctatgagttttgtcttagaatttcactttgaacccaatgaatattttacaaatgaagtgctgacaaagacatacaggatgaggtcagaaccagatgattctgatcccttttcttttgatggaccagaaattatgggttgtacagggtgccagatagattggaaaaaaggaaagaatgtcactttgaaaactattaagaagaagcagaaacacaagggacgtgggacagttcgtactgtgactaaaacagtttccaatgactctttctttaacttttttgcccctcctgaagttcctgagagtggagatctggatgatgatgctgaagctatccttgctgcagacttcgaaattggtcactttttacgtgagcgtataatcccaagatcagtgttatattttactggagaagctattgaagatgatgatgatgattatgatgaagaaggtgaagaagcggatgaggaaggggaagaagaaggagatgaggaaaatgatccagactatgacccaaagaaggatcaaaacccagcagagtgcaagcagcagtgaagcaggatgtatgtggccttgaggataacctgcactggtctaccttctgcttccctggaaaggatgaatttacatcatttgacaagcctattttcaagttatttgttgtttgtttgcttgtttttgtttttgcagctaaaataaaaatttcaaatacaattttagttcttacaagataatgtcttaattttgtaccaattcaggtagaagtagaggcctaccttgaattaagggttatactcagtttttaacacattgttgaagaaaaggtaccagctttggaacgagatgctatactaataagcaagtgtaaaaaaaaaaaaaaaagaggaagaaaatcttaagtgattgatgctgttttcttttaaaaaaaaaaaaaaaaattcattttctttgggttagagctagagagaaggccccaagcttctatggtttcttctaattcttattgcttaaagtatgagtatgtcacttacccgtgcttctgtttactgtgtaattaaaatgggtagtactgtttacctaactacctcatggatgtgttaaggcatattgagttaaatctcatataatgtttctcaatcttgttaaaagctcaaaattttgggcctatttgtaatgccagtgtgacactaagcattttgttcacaccacgctttgataactaaactggaaaacaaaggtgttaagtacctctgttctggatctgggcagtcagcactctttttagatctttgtgtggctcctatttttatagaagtggagggatgcactatttcacaaggtccaagatttgttttcagatatttttgatgactgtattgtaaatactacagggatagcactatagtattgtagtcatgagacttaaagtggaaataagactatttttgacaaaagatgccattaaatttcagactgtagagccacatttacaatacctcaggctaattactgttaattttggggttgaactttttttgacagtgagggtggattattggattgtcattagaggaaggtctagatttcctgctcttaataaaattacattgaattgatttttagaggtaatgaaaacttcctttctgagaagttagtgttaaggtcttggaatgtgaacacattgtttgtagtgctatccattcctctcctgagattttaacttactactggaaatccttaaccaattataatagctttttttctttattttcaaaatgatttcctttgctttgattagacactatgtgctttttttttttaaccatagttcatcgaaatgcagctttttctgaacttcaaagatagaatcccatttttaatgaactgaagtagcaaaatcatctttttcattctttaggaaatagctattgccaaagtgaaggtgtagataatacctagtcttgttacataaaggggatgtggtttgcagaagaattttctttataaaattgaagttttaagggacgtcagtgtttatgccatttttccagttccaaaatgattccattccattctagaaatttgaagtatgtaacctgaaatccttaataaaatttggatttaattttataaaaaaaaaaaaaaaaaaaaaaaaaaaaaaaa

SEQ ID NO: 67 - DNA, 3582 bp, Human
  NAP1L1
ctgctcgcggcgccgcctcctgctcctcccgctgctgctgccgctgccgccctgagtcactgcctgcgcagctccggccgcctggctccccatactagtcgccgatatttggagttcttacaacatggcagacattgacaacaaagaacagtctgaacttgatcaagatttggatgatgttgaagaagtagaagaagaggaaactggtgaagaaacaaaactcaaagcacgtcagctaactgttcagatgatgcaaaatcctcagattcttgcagcccttcaagaaagacttgatggtctggtagaaacaccaacaggatacattgaaagcctgcctagggtagttaaaagacgagtgaatgctctcaaaaacctgcaagttaaatgtgcacagatagaagccaaattctatgaggaagttcacgatcttgaaaggaagtatgctgttctctatcagcctctatttgataagcgatttgaaattattaatgcaatttatgaacctacggaagaagaatgtgaatggaaaccagatgaagaagatgagatttcggaggaattgaaagaaaaggccaagattgaagatgagaaaaaggatgaagaaaaagaagaccccaaaggaattcctgaattttggttaactgtttttaagaatgttgacttgctcagtgatatggttcaggaacacgatgaacctattctgaagcacttgaaagatattaaagtgaagttctcagatgctggccagcctatgagttttgtcttagaatttcactttgaacccaatgaatattttacaaatgaagtgctgacaaagacatacaggatgaggtcagaaccagatgattctgatcccttttcttttgatggaccagaaattatgggttgtacagggtgccagatagattggaaaaaaggaaagaatgtcactttgaaaactattaagaagaagcagaaacacaagggacgtgggacagttcgtactgtgactaaaacagtttccaatgactctttctttaacttttttgcccctcctgaagttcctgagagtggagatctggatgatgatgctgaagctatccttgctgcagacttcgaaattggtcactttttacgtgagcgtataatcccaagatcagtgttatattttactggagaagctattgaagatgatgatgatgattatgatgaagaaggtgaagaagcggatgaggaaggggaagaagaaggagatgaggaaaatgatccagactatgacccaaagaaggatcaaaacccagcagagtgcaagcagcagtgaagcaggatgtatgtggccttgaggataacctgcactgtaatagcctaaacacaactcttatttacttacagccttatgtttttgtattttcttggtagactaggtaatttttttttaaaggacaggaaactgatattttaaagaccaatttgttctacctagcattttaactagtttttctgccagctatgttgaatgcacaaattctgtcacgcatgttcattcattgctacataatttggttcttctggaatatttttatgtagctcttggagtacagctatgaaaattaacaactgttaaaggaaataccttttttttttttttgtaattttttccttgaagaaccaaagtattttttcagctggttgttgaatagggttaagtccgcttggattagctgtgcctttcattactttgttacagaaatgcagtgacttatactaagacaatttattgtttaaaaaaaaaattggcaagacaactatatggttaagaatttccagtatgaccacacccaataactgttattagagtgttaatggattattgtgttttaggtgacatagttaactgtaaagtaacctgactcagtatagttactggtaccacagtgaggtgaataaaacgggattttcagaagttagcctgaatttaactgtatttttaaatttaacctccattaactaagcatcttttctttgtggtagggtctaccttctgcttccctggaaaggatgaatttacatcatttgacaagcctattttcaagttatttgttgtttgtttgcttgtttttgtttttgcagctaaaataaaaatttcaaatacaattttagttcttacaagataatgtcttaattttgtaccaattcaggtagaagtagaggcctaccttgaattaagggttatactcagtttttaacacattgttgaagaaaaggtaccagctttggaacgagatgctatactaataagcaagtgtaaaaaaaaaaaaaaaagaggaagaaaatcttaagtgattgatgctgttttcttttaaaaaaaaaaaaaaaaattcattttctttgggttagagctagagagaaggccccaagcttctatggtttcttctaattcttattgcttaaagtatgagtatgtcacttacccgtgcttctgtttactgtgtaattaaaatgggtagtactgtttacctaactacctcatggatgtgttaaggcatattgagttaaatctcatataatgtttctcaatcttgttaaaagctcaaaattttgggcctatttgtaatgccagtgtgacactaagcattttgttcacaccacgctttgataactaaactggaaaacaaaggtgttaagtacctctgttctggatctgggcagtcagcactctttttagatctttgtgtggctcctatttttatagaagtggagggatgcactatttcacaaggtccaagatttgttttcagatatttttgatgactgtattgtaaatactacagggatagcactatagtattgtagtcatgagacttaaagtggaaataagactatttttgacaaaagatgccattaaatttcagactgtagagccacatttacaatacctcaggctaattactgttaattttggggttgaactttttttgacagtgagggtggattattggattgtcattagaggaaggtctagatttcctgctcttaataaaattacattgaattgatttttagaggtaatgaaaacttcctttctgagaagttagtgttaaggtcttggaatgtgaacacattgtttgtagtgctatccattcctctcctgagattttaacttactactggaaatccttaaccaattataatagctttttttctttattttcaaaatgatttcctttgctttgattagacactatgtgctttttttttttaaccatagttcatcgaaatgcagctttttctgaacttcaaagatagaatcccatttttaatgaactgaagtagcaaaatcatctttttcattctttaggaaatagctattgccaaagtgaaggtgtagataatacctagtcttgttacataaaggggatgtggtttgcagaagaattttctttataaaattgaagttttaagggacgtcagtgtttatgccatttttccagttccaaaatgattccattccattctagaaatttgaagtatgtaacctgaaatccttaataaaatttggatttaattttataaaaaaaaaaaaaaaaaaaaaaaaaaaaaaaa

SEQ ID NO: 68 - protein, 353 aa, Human
  PNMA1
MAMTLLEDWCRGMDVNSQRALLVWGIPVNCDEAEIEETLQAAMPQVSYRMLGRMFWREENAKAALLELTGAVDYAAIPREMPGKGGVWKVLFKPPTSDAEFLERLHLFLAREGWTVQDVARVLGFQNPTPTPGPEMPAEMLNYILDNVIQPLVESIWYKRLTLFSGRDIPGPGEETFDPWLEHTNEVLEEWQVSDVEKRRRLMESLRGPAADVIRILKSNNPAITTAECLKALEQVFGSVESSRDAQIKFLNTYQNPGEKLSAYVIRLEPLLQKVVEKGAIDKDNVNQARLEQVIAGANHSGAIRRQLWLTGAGEGPAPNLFQLLVQIREEEAKEEEEEAEATLLQLGLEGHF

SEQ ID NO: 69 - DNA, 2666 bp, Human
  PNMA1
ggggcggacgccgctcgccggctggccccatcctccactgcagcagtaacgtcgcggcgggttgcgggtaggactggacgccagagcagccgcgcagcgcctgaaccgctgcgggccgccgcggccgccccttcccaccctcgcctctgctgtctccagcctcgcttctccgactttcctgctcctctgctgccttcgtttctggtcctcggccgtcctcgccgcccgcccagaggagtccccgcgcccgccaagaagccgctttccgctggcccgcagccgccgcgacttcggcacagtttctccctctggctagtctcccaaacggccgctcctcgcccgcgggaagaccaggctgcgaccgcgaacgcccgatcctctccaggagccgcagcgagcgcccggcggccacgccccgcgaccacaccccggcggctctcggcccagcgcgcctgccttcgccgcccgccgtcgctcctcgcccgctgcacgacgacgcgacgcccctgctgcaggcggcggacccgaccggacccagacccagacgcaagatggcgacggccgcgtgactgcctcagcgtccccgagctcggctccgagtgcacctacggactgactgtgggggcagagaagggcgagatcaggactctgtctttgttaatcgtgactgcatgaaggtcgcctccctcgggcctacttggtgggagtgtctggtattgttctaaggccaggagcacggtgagccacagtctgttggtagaatttggcgtcttgatagttgagaaaatggcgatgacactgttggaagactggtgccgggggatggatgtgaactcccagagagctctgttagtctggggcatcccagtgaactgtgatgaggctgaaatcgaagagaccctccaggctgcgatgccccaggtctcctaccgaatgcttgggagaatgttctggagggaagaaaatgcgaaagcagccttattagagctcactggcgctgtagattacgccgcgatccccagggagatgccgggcaaaggaggggtctggaaagtgttatttaagcccccaacttctgatgctgaatttttagaaagattgcacctcttcctagctagagaggggtggaccgtgcaagatgttgcccgtgtccttgggtttcagaaccctactccgaccccgggcccagagatgccagcagagatgctaaactatattttggataatgttattcagcctcttgttgagtccatatggtacaagaggctgacacttttctcggggagggacatcccagggcctggagaggaaacctttgatccctggctggagcacactaatgaggtcctagaggagtggcaggtgtccgatgtagaaaagaggcggcggttgatggagagtcttagaggccccgccgctgatgttattcgcatccttaagtccaacaaccccgcgataaccactgccgaatgcctgaaggcgcttgagcaggtgtttgggagcgttgagagctctagggatgcccagatcaaatttctgaacacttatcagaacccgggagaaaaattgtctgcttatgtcattcgtctggagcctctgctacagaaggtggtagagaagggggccattgataaagataatgtgaaccaggcccgcctagagcaggtcattgccggggccaaccacagcggggccatccgaaggcagctgtggcttaccggggctggggaagggccagccccaaacctctttcagttgctggtgcagatccgtgaggaggaagccaaggaggaggaggaggaggctgaggccacccttctgcagttaggcctggaagggcacttctgagtgccaggaaaggcagctttagtgcagacctagatcacagctacttttcttgtccctgtggggtcttacagatgtgtctctgagtagtaaaggcttagccttgttctgttttgttgttttttggaggggaaggttagtcaggcctgagtattcatgtaacattctaaaattgtgccagcgagcaccgtgaacgactgcaatgcaagcgggtcttgctggctaaaatgccaggtaaagggttggttggacacagcgcttagtgcacgctgtcatcatggacatcataatcagttgtgaaaaacacgcgaacctatgacacttcttattccacactgaatgtgaaattgcatgttcagatgtttactacgaggcctggctcacaggaagtgttcagtaaaagtatgcactgttagattactgataacgcggatagatttttgtttaccataaattgttccagatttatattaatggaaggaagtgtgcatttattagctattactcaactttacaatgcaaacatcttatttctcatctttaaacatgtcgaccagtttaattgaaaagtattctgagactgcaaaatggggtgttaaaaaatactgcagttacggagctgtgtaaaccagtttctcattgcataagatacagatgtaaattgcatggagaggttgatatgcacctgtacagtaattcactcccccatttcacatctttgtcagagaatagttcttgttcatactgagtgttctaaatttgaagttatatatacaaattaaaatattttaaaaattcaaaaaaaaaaaaaaaaaaaaaaa

SEQ ID NO: 70 - protein, 320 aa, Human
  HNRPA1
MSKSESPKEPEQLRKLFIGGLSFETTDESLRSHFEQWGTLTDCVVMRDPNTKRSRGFGFVTYATVEEVDAAMNARPHKVDGRVVEPKRAVSREDSQRPGAHLTVKKIFVGGIKEDTEEHHLRDYFEQYGKIEVIEIMTDRGSGKKRGFAFVTFDDHDSVDKIVIQKYHTVNGHNCEVRKALSKQEMASASSSQRGRSGSGNFGGGRGGGFGGNDNFGRGGNFSGRGGFGGSRGGGGYGGSGDGYNGFGNDGSNFGGGGSYNDFGNYNNQSSNFGPMKGGNFGGRSSGPYGGGGQYFAKPRNQGGYGGSSSSSSYGSGRRF

SEQ ID NO: 71 - protein, 372 aa, Human
  HNRNPA1
MSKSESPKEPEQLRKLFIGGLSFETTDESLRSHFEQWGTLTDCVVMRDPNTKRSRGFGFVTYATVEEVDAAMNARPHKVDGRVVEPKRAVSREDSQRPGAHLTVKKIFVGGIKEDTEEHHLRDYFEQYGKIEVIEIMTDRGSGKKRGFAFVTFDDHDSVDKIVIQKYHTVNGHNCEVRKALSKQEMASASSSQRGRSGSGNFGGGRGGGFGGNDNFGRGGNFSGRGGFGGSRGGGGYGGSGDGYNGFGNDGGYGGGGPGYSGGSRGYGSGGQGYGNQGSGYGGSGSYDSYNNGGGGGFGGGSGSNFGGGGSYNDFGNYNNQSSNFGPMKGGNFGGRSSGPYGGGGQYFAKPRNQGGYGGSSSSSSYGSGRRF

SEQ ID NO: 72 - DNA, 1785 bp, Human
  HNRPA1
gagagggcgaaggtaggctggcagatacgttcgtcagcttgctcctttctgcccgtggacgccgccgaagaagcatcgttaaagtctctcttcaccctgccgtcatgtctaagtcagagtctcctaaagagcccgaacagctgaggaagctcttcattggagggttgagctttgaaacaactgatgagagcctgaggagccattttgagcaatggggaacgctcacggactgtgtggtaatgagagatccaaacaccaagcgctccaggggctttgggtttgtcacatatgccactgtggaggaggtggatgcagctatgaatgcaaggccacacaaggtggatggaagagttgtggaaccaaagagagctgtctccagagaagattctcaaagaccaggtgcccacttaactgtgaaaaagatatttgttggtggcattaaagaagacactgaagaacatcacctaagagattattttgaacagtatggaaaaattgaagtgattgaaatcatgactgaccgaggcagtggcaagaaaaggggctttgcctttgtaacctttgacgaccatgactccgtggataagattgtcattcagaaataccatactgtgaatggccacaactgtgaagttagaaaagccctgtcaaagcaagagatggctagtgcttcatccagccaaagaggtcgaagtggttctggaaactttggtggtggtcgtggaggtggtttcggtgggaatgacaacttcggtcgtggaggaaacttcagtggtcgtggtggctttggtggcagccgtggtggtggtggatatggtggcagtggggatggctataatggatttggtaatgatggaagcaattttggaggtggtggaagctacaatgattttgggaattacaacaatcagtcttcaaattttggacccatgaagggaggaaattttggaggcagaagctctggcccctatggcggtggaggccaatactttgcaaaaccacgaaaccaaggtggctatggcggttccagcagcagcagtagctatggcagtggcagaagattttaattaggaaacaaagcttagcaggagaggagagccagagaagtgacagggaagctacaggttacaacagatttgtgaactcagccaagcacagtggtggcagggcctagctgctacaaagaagacatgttttagacaaatactcatgtgtatgggcaaaaaactcgaggactgtatttgtgactaattgtataacaggttattttagtttctgttctgtggaaagtgtaaagcattccaacaaagggttttaatgtagatttttttttttgcaccccatgctgttgattgctaaatgtaacagtctgatcgtgacgctgaataaatgtcttttttttaatgtgctgtgtaaagttagtctactcttaagccatcttggtaaatttccccaacagtgtgaagttagaattccttcagggtgatgccaggttctatttggaatttatatacaacctgcttgggtggagaagccattgtcttcggaaaccttggtgtagttgaactgatagttactgttgtgacctgaagttcaccattaaaagggattacccaagcaaaatcatggaatggttataaaagtgattgttggcacatcctatgcaatatatctaaattgaataatggtaccagataaaattatagatgggaatgaagcttgtgtatccattatcatgtgtaatcaataaacgatttaattctcttgaaaaaaaaaaaaaaaaaa

SEQ ID NO: 73 - DNA, 1941 bp, Human
  HNRNPA1
gagagggcgaaggtaggctggcagatacgttcgtcagcttgctcctttctgcccgtggacgccgccgaagaagcatcgttaaagtctctcttcaccctgccgtcatgtctaagtcagagtctcctaaagagcccgaacagctgaggaagctcttcattggagggttgagctttgaaacaactgatgagagcctgaggagccattttgagcaatggggaacgctcacggactgtgtggtaatgagagatccaaacaccaagcgctccaggggctttgggtttgtcacatatgccactgtggaggaggtggatgcagctatgaatgcaaggccacacaaggtggatggaagagttgtggaaccaaagagagctgtctccagagaagattctcaaagaccaggtgcccacttaactgtgaaaaagatatttgttggtggcattaaagaagacactgaagaacatcacctaagagattattttgaacagtatggaaaaattgaagtgattgaaatcatgactgaccgaggcagtggcaagaaaaggggctttgcctttgtaacctttgacgaccatgactccgtggataagattgtcattcagaaataccatactgtgaatggccacaactgtgaagttagaaaagccctgtcaaagcaagagatggctagtgcttcatccagccaaagaggtcgaagtggttctggaaactttggtggtggtcgtggaggtggtttcggtgggaatgacaacttcggtcgtggaggaaacttcagtggtcgtggtggctttggtggcagccgtggtggtggtggatatggtggcagtggggatggctataatggatttggtaatgatggtggttatggaggaggcggccctggttactctggaggaagcagaggctatggaagtggtggacagggttatggaaaccagggcagtggctatggcgggagtggcagctatgacagctataacaacggaggcggaggcggctttggcggtggtagtggaagcaattttggaggtggtggaagctacaatgattttgggaattacaacaatcagtcttcaaattttggacccatgaagggaggaaattttggaggcagaagctctggcccctatggcggtggaggccaatactttgcaaaaccacgaaaccaaggtggctatggcggttccagcagcagcagtagctatggcagtggcagaagattttaattaggaaacaaagcttagcaggagaggagagccagagaagtgacagggaagctacaggttacaacagatttgtgaactcagccaagcacagtggtggcagggcctagctgctacaaagaagacatgttttagacaaatactcatgtgtatgggcaaaaaactcgaggactgtatttgtgactaattgtataacaggttattttagtttctgttctgtggaaagtgtaaagcattccaacaaagggttttaatgtagatttttttttttgcaccccatgctgttgattgctaaatgtaacagtctgatcgtgacgctgaataaatgtcttttttttaatgtgctgtgtaaagttagtctactcttaagccatcttggtaaatttccccaacagtgtgaagttagaattccttcagggtgatgccaggttctatttggaatttatatacaacctgcttgggtggagaagccattgtcttcggaaaccttggtgtagttgaactgatagttactgttgtgacctgaagttcaccattaaaagggattacccaagcaaaatcatggaatggttataaaagtgattgttggcacatcctatgcaatatatctaaattgaataatggtaccagataaaattatagatgggaatgaagcttgtgtatccattatcatgtgtaatcaataaacgatttaattctcttgaaaaaaaaaaaaaaaaaa

SEQ ID NO: 74 - protein, 1907 aa, Human
  PTPRF
MAPEPAPGRTMVPLVPALVMLGLVAGAHGDSKPVFIKVPEDQTGLSGGVASFVCQATGEPKPRITWMKKGKKVSSQRFEVIEFDDGAGSVLRIQPLRVQRDEAIYECTATNSLGEINTSAKLSVLEEEQLPPGFPSIDMGPQLKVVEKARTATMLCAAGGNPDPEISWFKDFLPVDPATSNGRIKQLRSGALQIESSEESDQGKYECVATNSAGTRYSAPANLYVRVRRVAPRFSIPPSSQEVMPGGSVNLTCVAVGAPMPYVKWMMGAEELTKEDEMPVGRNVLELSNVVRSANYTCVAISSLGMIEATAQVTVKALPKPPIDLVVTETTATSVTLTWDSGNSEPVTYYGIQYRAAGTEGPFQEVDGVATTRYSIGGLSPFSEYAFRVLAVNSIGRGPPSEAVRARTGEQAPSSPPRRVQARMLSASTMLVQWEPPEEPNGLVRGYRVYYTPDSRRPPNAWHKHNTDAGLLTTVGSLLPGITYSLRVLAFTAVGDGPPSPTIQVKTQQGVPAQPADFQAEVESDTRIQLSWLLPPQERIIMYELVYWAAEDEDQQHKVTFDPTSSYTLEDLKPDTLYRFQLAARSDMGVGVFTPTIEARTAQSTPSAPPQKVMCVSMGSTTVRVSWVPPPADSRNGVITQYSVAYEAVDGEDRGRHVVDGISREHSSWDLVGLEKWTEYRVWVRAHTDVGPGPESSPVLVRTDEDVPSGPPRKVEVEPLNSTAVHVYWKLPVPSKQHGQIRGYQVTYVRLENGEPRGLPIIQDVMLAEAQWRPEESEDYETTISGLTPETTYSVTVAAYTTKGDGARSKPKIVTTTGAVPGRPTMMISTTAMNTALLQWHPPKELPGELLGYRLQYCRADEARPNTIDFGKDDQHFTVTGLHKGTTYIFRLAAKNRAGLGEEFEKEIRTPEDLPSGFPQNLHVTGLTTSTTELAWDPPVLAERNGRIISYTVVFRDINSQQELQNITTDTRFTLTGLKPDTTYDIKVRAWTSKGSGPLSPSIQSRTMPVEQVFAKNFRVAAAMKTSVLLSWEVPDSYKSAVPFKILYNGQSVEVDGHSMRKLIADLQPNTEYSFVLMNRGSSAGGLQHLVSIRTAPDLLPHKPLPASAYIEDGRFDLSMPHVQDPSLVRWFYIVVVPIDRVGGSMLTPRWSTPEELELDELLEAIEQGGEEQRRRRRQAERLKPYVAAQLDVLPETFTLGDKKNYRGFYNRPLSPDLSYQCFVLASLKEPMDQKRYASSPYSDEIVVQVTPAQQQEEPEMLWVTGPVLAVILIILIVIAILLFKRKRTHSPSSKDEQSIGLKDSLLAHSSDPVEMRRLNYQTPGMRDHPPIPITDLADNIERLKANDGLKFSQEYESIDPGQQFTWENSNLEVNKPKNRYANVIAYDHSRVILTSIDGVPGSDYINANYIDGYRKQNAYIATQGPLPETMGDFWRMVWEQRTATVVMMTRLEEKSRVKCDQYWPARGTETCGLIQVTLLDTVELATYTVRTFALHKSGSSEKRELRQFQFMAWPDHGVPEYPTPILAFLRRVKACNPLDAGPMVVHCSAGVGRTGCFIVIDAMLERMKHEKTVDIYGHVTCMRSQRNYMVQTEDQYVFIHEALLEAATCGHTEVPARNLYAHIQKLGQVPPGESVTAMELEFKLLASSKAHTSRFISANLPCNKFKNRLVNIMPYELTRVCLQPIRGVEGSDYINASFLDGYRQQKAYIATQGPLAESTEDFWRMLWEHNSTIIVMLTKLREMGREKCHQYWPAERSARYQYFVVDPMAEYNMPQYILREFKVTDARDGQSRTIRQFQFTDWPEQGVPKTGEGFIDFIGQVHKTKEQFGQDGPITVHCSAGVGRTGVFITLSIVLERMRYEGVVDMFQTVKTLRTQRPAMVQTEDQYQLCYRAALEYLGSFDHYAT

SEQ ID NO: 75 - protein, 1898 aa, Human
  PTPRF
MAPEPAPGRTMVPLVPALVMLGLVAGAHGDSKPVFIKVPEDQTGLSGGVASFVCQATGEPKPRITWMKKGKKVSSQRFEVIEFDDGAGSVLRIQPLRVQRDEAIYECTATNSLGEINTSAKLSVLEEEQLPPGFPSIDMGPQLKVVEKARTATMLCAAGGNPDPEISWFKDFLPVDPATSNGRIKQLRSGALQIESSEESDQGKYECVATNSAGTRYSAPANLYVRVRRVAPRFSIPPSSQEVMPGGSVNLTCVAVGAPMPYVKWMMGAEELTKEDEMPVGRNVLELSNVVRSANYTCVAISSLGMIEATAQVTVKALPKPPIDLVVTETTATSVTLTWDSGNSEPVTYYGIQYRAAGTEGPFQEVDGVATTRYSIGGLSPFSEYAFRVLAVNSIGRGPPSEAVRARTGEQAPSSPPRRVQARMLSASTMLVQWEPPEEPNGLVRGYRVYYTPDSRRPPNAWHKHNTDAGLLTTVGSLLPGITYSLRVLAFTAVGDGPPSPTIQVKTQQGVPAQPADFQAEVESDTRIQLSWLLPPQERIIMYELVYWAAEDEDQQHKVTFDPTSSYTLEDLKPDTLYRFQLAARSDMGVGVFTPTIEARTAQSTPSAPPQKVMCVSMGSTTVRVSWVPPPADSRNGVITQYSVAYEAVDGEDRGRHVVDGISREHSSWDLVGLEKWTEYRVWVRAHTDVGPGPESSPVLVRTDEDVPSGPPRKVEVEPLNSTAVHVYWKLPVPSKQHGQIRGYQVTYVRLENGEPRGLPIIQDVMLAEAQETTISGLTPETTYSVTVAAYTTKGDGARSKPKIVTTTGAVPGRPTMMISTTAMNTALLQWHPPKELPGELLGYRLQYCRADEARPNTIDFGKDDQHFTVTGLHKGTTYIFRLAAKNRAGLGEEFEKEIRTPEDLPSGFPQNLHVTGLTTSTTELAWDPPVLAERNGRIISYTVVFRDINSQQELQNITTDTRFTLTGLKPDTTYDIKVRAWTSKGSGPLSPSIQSRTMPVEQVFAKNFRVAAAMKTSVLLSWEVPDSYKSAVPFKILYNGQSVEVDGHSMRKLIADLQPNTEYSFVLMNRGSSAGGLQHLVSIRTAPDLLPHKPLPASAYIEDGRFDLSMPHVQDPSLVRWFYIVVVPIDRVGGSMLTPRWSTPEELELDELLEAIEQGGEEQRRRRRQAERLKPYVAAQLDVLPETFTLGDKKNYRGFYNRPLSPDLSYQCFVLASLKEPMDQKRYASSPYSDEIVVQVTPAQQQEEPEMLWVTGPVLAVILIILIVIAILLFKRKRTHSPSSKDEQSIGLKDSLLAHSSDPVEMRRLNYQTPGMRDHPPIPITDLADNIERLKANDGLKFSQEYESIDPGQQFTWENSNLEVNKPKNRYANVIAYDHSRVILTSIDGVPGSDYINANYIDGYRKQNAYIATQGPLPETMGDFWRMVWEQRTATVVMMTRLEEKSRVKCDQYWPARGTETCGLIQVTLLDTVELATYTVRTFALHKSGSSEKRELRQFQFMAWPDHGVPEYPTPILAFLRRVKACNPLDAGPMVVHCSAGVGRTGCFIVIDAMLERMKHEKTVDIYGHVTCMRSQRNYMVQTEDQYVFIHEALLEAATCGHTEVPARNLYAHIQKLGQVPPGESVTAMELEFKLLASSKAHTSRFISANLPCNKFKNRLVNIMPYELTRVCLQPIRGVEGSDYINASFLDGYRQQKAYIATQGPLAESTEDFWRMLWEHNSTIIVMLTKLREMGREKCHQYWPAERSARYQYFVVDPMAEYNMPQYILREFKVTDARDGQSRTIRQFQFTDWPEQGVPKTGEGFIDFIGQVHKTKEQFGQDGPITVHCSAGVGRTGVFITLSIVLERMRYEGVVDMFQTVKTLRTQRPAMVQTEDQYQLCYRAALEYLGSFDHYAT

SEQ ID NO: 76 - DNA, 7733 bp, Human
  PTPRF
cgggagcggcgggagcggtggcggcggcagaggcggcggctccagcttcggctccggctcgggctcgggctccggctccggctccggctccggctccagctcgggtggcggtggcgggagcgggaccaggtggaggcggcggcggcagaggagtgggagcagcggccctagcggcttgcggggggacatgcggaccgacggcccctggataggcggaaggagtggaggccctggtgcccggcccttggtgctgagtatccagcaagagtgaccggggtgaagaagcaaagactcggttgattgtcctgggctgtggctggctgtggagctagagccctggatggcccctgagccagccccagggaggacgatggtgccccttgtgcctgcactggtgatgcttggtttggtggcaggcgcccatggtgacagcaaacctgtcttcattaaagtccctgaggaccagactgggctgtcaggaggggtagcctccttcgtgtgccaagctacaggagaacccaagccgcgcatcacatggatgaagaaggggaagaaagtcagctcccagcgcttcgaggtcattgagtttgatgatggggcagggtcagtgcttcggatccagccattgcgggtgcagcgagatgaagccatctatgagtgtacagctactaacagcctgggtgagatcaacactagtgccaagctctcagtgctcgaagaggaacagctgccccctgggttcccttccatcgacatggggcctcagctgaaggtggtggagaaggcacgcacagccaccatgctatgtgccgcaggcggaaatccagaccctgagatttcttggttcaaggacttccttcctgtagaccctgccacgagcaacggccgcatcaagcagctgcgttcaggtgccttgcagatagagagcagtgaggaatccgaccaaggcaagtacgagtgtgtggcgaccaactcggcaggcacacgttactcagcccctgcgaacctgtatgtgcgagtgcgccgcgtggctcctcgtttctccatccctcccagcagccaggaggtgatgccaggcggcagcgtgaacctgacatgcgtggcagtgggtgcacccatgccctacgtgaagtggatgatgggggccgaggagctcaccaaggaggatgagatgccagttggccgcaacgtcctggagctcagcaatgtcgtacgctctgccaactacacctgtgtggccatctcctcgctgggcatgatcgaggccacagcccaggtcacagtgaaagctcttccaaagcctccgattgatcttgtggtgacagagacaactgccaccagtgtcaccctcacctgggactctgggaactcggagcctgtaacctactatggcatccagtaccgcgcagcgggcacggagggcccctttcaggaggtggatggtgtggccaccacccgctacagcattggcggcctcagccctttctcggaatatgccttccgcgtgctggcggtgaacagcatcgggcgagggccgcccagcgaggcagtgcgggcacgcacgggagaacaggcgccctccagcccaccgcgccgcgtgcaggcacgcatgctgagcgccagcaccatgctggtgcagtgggagcctcccgaggagcccaacggcctggtgcggggataccgcgtctactatactccggactcccgccgccccccgaacgcctggcacaagcacaacaccgacgcggggctcctcacgaccgtgggcagcctgctgcctggcatcacctacagcctgcgcgtgcttgccttcaccgccgtgggcgatggccctcccagccccaccatccaggtcaagacgcagcagggagtgcctgcccagcccgcggacttccaggccgaggtggagtcggacaccaggatccagctctcgtggctgctgccccctcaggagcggatcatcatgtatgaactggtgtactgggcggcagaggacgaagaccaacagcacaaggtgaccttcgacccaacctcctcctacacactagaggacctgaagcctgacacactctaccgcttccagctggctgcacgctcggatatgggggtgggcgtcttcacccccaccattgaggcccgcacagcccagtccaccccctccgcccctccccagaaggtgatgtgtgtgagcatgggctccaccacggtccgggtaagttgggtcccgccgcctgccgacagccgcaacggcgttatcacccagtactccgtggcctacgaggcggtggacggcgaggaccgcgggcggcatgtggtggatggcatcagccgtgagcactccagctgggacctggtgggcctggagaagtggacggagtaccgggtgtgggtgcgggcacacacagacgtgggccccggccccgagagcagcccggtgctggtgcgcaccgatgaggacgtgcccagcgggcctccgcggaaggtggaggtggagccactgaactccactgctgtgcatgtctactggaagctgcctgtccccagcaagcagcatggccagatccgcggctaccaggtcacctacgtgcggctggagaatggcgagccccgtggactccccatcatccaagacgtcatgctagccgaggcccagtggcggccagaggagtccgaggactatgaaaccactatcagcggcctgaccccggagaccacctactccgttactgttgctgcctataccaccaagggggatggtgcccgcagcaagcccaaaattgtcactacaacaggtgcagtcccaggccggcccaccatgatgatcagcaccacggccatgaacactgcgctgctccagtggcacccacccaaggaactgcctggcgagctgctgggctaccggctgcagtactgccgggccgacgaggcgcggcccaacaccatagatttcggcaaggatgaccagcacttcacagtcaccggcctgcacaaggggaccacctacatcttccggcttgctgccaagaaccgggctggcttgggtgaggagttcgagaaggagatcaggacccccgaggacctgcccagcggcttcccccaaaacctgcatgtgacaggactgaccacgtctaccacagaactggcctgggacccgccagtgctggcggagaggaacgggcgcatcatcagctacaccgtggtgttccgagacatcaacagccaacaggagctgcagaacatcacgacagacacccgctttacccttactggcctcaagccagacaccacttacgacatcaaggtccgcgcatggaccagcaaaggctctggcccactcagccccagcatccagtcccggaccatgccggtggagcaagtgtttgccaagaacttccgggtggcggctgcaatgaagacgtctgtgctgctcagctgggaggttcccgactcctataagtcagctgtgccctttaagattctgtacaatgggcagagtgtggaggtggacgggcactcgatgcggaagctgatcgcagacctgcagcccaacacagagtactcgtttgtgctgatgaaccgtggcagcagcgcagggggcctgcagcacctggtgtccatccgcacagcccccgacctcctgcctcacaagccgctgcctgcctctgcctacatagaggacggccgcttcgatctctccatgccccatgtgcaagacccctcgcttgtcaggtggttctacattgttgtggtgcccattgaccgtgtgggcgggagcatgctgacgccaaggtggagcacacccgaggaactggagctggacgagcttctagaagccatcgagcaaggcggagaggagcagcggcggcggcggcggcaggcagaacgtctgaagccatatgtggctgctcaactggatgtgctcccggagacctttaccttgggggacaagaagaactaccggggcttctacaaccggcccctgtctccggacttgagctaccagtgctttgtgcttgcctccttgaaggaacccatggaccagaagcgctatgcctccagcccctactcggatgagatcgtggtccaggtgacaccagcccagcagcaggaggagccggagatgctgtgggtgacgggtcccgtgctggcagtcatcctcatcatcctcattgtcatcgccatcctcttgttcaaaaggaaaaggacccactctccgtcctctaaggatgagcagtcgatcggactgaaggactccttgctggcccactcctctgaccctgtggagatgcggaggctcaactaccagaccccaggtatgcgagaccacccacccatccccatcaccgacctggcggacaacatcgagcgcctcaaagccaacgatggcctcaagttctcccaggagtatgagtccatcgaccctggacagcagttcacgtgggagaattcaaacctggaggtgaacaagcccaagaaccgctatgcgaatgtcatcgcctacgaccactctcgagtcatccttacctctatcgatggcgtccccgggagtgactacatcaatgccaactacatcgatggctaccgcaagcagaatgcctacatcgccacgcagggccccctgcccgagaccatgggtgatttctggaggatggtgtgggaacagcgcacggccactgtggtcatgatgacacggctggaggagaagtcccgggtaaaatgtgatcagtactggccagcccgtggcaccgagacctgtggccttattcaggtgaccctgttggacacagtggagctggccacatacactgtgcgcaccttcgcactccacaagagtggctccagtgagaagcgcgagctgcgtcagtttcagttcatggcctggccagaccatggagttcctgagtacccaactcccatcctggccttcctacgacgggtcaaggcctgcaaccccctagacgcagggcccatggtggtgcactgcagcgcgggcgtgggccgcaccggctgcttcatcgtgattgatgccatgttggagcggatgaagcacgagaagacggtggacatctatggccacgtgacctgcatgcgatcacagaggaactacatggtgcagacggaggaccagtacgtgttcatccatgaggcgctgctggaggctgccacgtgcggccacacagaggtgcctgcccgcaacctgtatgcccacatccagaagctgggccaagtgcctccaggggagagtgtgaccgccatggagctcgagttcaagttgctggccagctccaaggcccacacgtcccgcttcatcagcgccaacctgccctgcaacaagttcaagaaccggctggtgaacatcatgccctacgaattgacccgtgtgtgtctgcagcccatccgtggtgtggagggctctgactacatcaatgccagcttcctggatggttatagacagcagaaggcctacatagctacacaggggcctctggcagagagcaccgaggacttctggcgcatgctatgggagcacaattccaccatcatcgtcatgctgaccaagcttcgggagatgggcagggagaaatgccaccagtactggccagcagagcgctctgctcgctaccagtactttgttgttgacccgatggctgagtacaacatgccccagtatatcctgcgtgagttcaaggtcacggatgcccgggatgggcagtcaaggacaatccggcagttccagttcacagactggccagagcagggcgtgcccaagacaggcgagggattcattgacttcatcgggcaggtgcataagaccaaggagcagtttggacaggatgggcctatcacggtgcactgcagtgctggcgtgggccgcaccggggtgttcatcactctgagcatcgtcctggagcgcatgcgctacgagggcgtggtcgacatgtttcagaccgtgaagaccctgcgtacacagcgtcctgccatggtgcagacagaggaccagtatcagctgtgctaccgtgcggccctggagtacctcggcagctttgaccactatgcaacgtaactaccgctcccctctcctccgccacccccgccgtggggctccggaggggacccagctcctctgagccataccgaccatcgtccagccctcctacgcagatgctgtcactggcagagcacagcccacggggatcacagcgtttcaggaacgttgccacaccaatcagagagcctagaacatccctgggcaagtggatggcccagcaggcaggcactgtggcccttctgtccaccagacccacctggagcccgcttcaagctctctgttgcgctcccgcatttctcatgcttcttctcatggggtggggttggggcaaagcctcctttttaatacattaagtggggtagactgagggattttagcctcttccctctgatttttcctttcgcgaatccgtatctgcagaatgggccactgtaggggttggggtttattttgttttgtttttttttttcttgagttcactttggatccttattttgtatgacttctgctgaaggacagaacattgccttcctcgtgcagagctggggctgccagcctgagcggaggctcggccgtgggccgggaggcagtgctgatccggctgctcctccagcccttcagacgagatcctgtttcagctaaatgcagggaaactcaatgtttttttaagttttgttttccctttaaagcctttttttaggccacattgacagtggtgggcggggagaagatagggaacactcatccctggtcgtctatcccagtgtgtgtttaacattcacagcccagaaccacagatgtgtctgggagagcctggcaaggcattcctcatcaccatcgtgtttgcaaaggttaaaacaaaaacaaaaaaccacaaaaataaaaaacaaaaaaaacaaaaaacccaagaaaaaaaaaaagagtcagcccttggcttctgcttcaaaccctcaagaggggaagcaactccgtgtgcctggggttcccgagggagctgctggctgacctgggcccacagagcctggctttggtccccagcattgcagtatggtgtggtgtttgtaggctgtggggtctggctgtgtggccaaggtgaatagcacaggttagggtgtgtgccacaccccatgcacctcagggccaagcgggggcgtggctggcctttcaggtccaggccagtgggcctggtagcacatgtctgtcctcagagcaggggccagatgattttcctccctggtttgcagctgttttcaaagcccccgataatcgctcttttccactccaagatgccctcataaaccaatgtggcaagactactggacttctatcaatggtactctaatcagtccttattatcccagcttgctgaggggcagggagagcgcctcttcctctgggcagcgctatctagataggtaagtgggggcggggaagggtgcatagctgttttagctgagggacgtggtgccgacgtccccaaacctagctaggctaagtcaagatcaacattccagggttggtaatgttggatgatgaaacattcatttttaccttgtggatgctagtgctgtagagttcactgttgtacacagtctgttttctatttgttaagaaaaactacagcatcattgcataattcttgatggtaataaatttgaataatcagatttcttacaaaccagga

SEQ ID NO: 77 - DNA, 7706 bp, Human
  PTPRF
cgggagcggcgggagcggtggcggcggcagaggcggcggctccagcttcggctccggctcgggctcgggctccggctccggctccggctccggctccagctcgggtggcggtggcgggagcgggaccaggtggaggcggcggcggcagaggagtgggagcagcggccctagcggcttgcggggggacatgcggaccgacggcccctggataggcggaaggagtggaggccctggtgcccggcccttggtgctgagtatccagcaagagtgaccggggtgaagaagcaaagactcggttgattgtcctgggctgtggctggctgtggagctagagccctggatggcccctgagccagccccagggaggacgatggtgccccttgtgcctgcactggtgatgcttggtttggtggcaggcgcccatggtgacagcaaacctgtcttcattaaagtccctgaggaccagactgggctgtcaggaggggtagcctccttcgtgtgccaagctacaggagaacccaagccgcgcatcacatggatgaagaaggggaagaaagtcagctcccagcgcttcgaggtcattgagtttgatgatggggcagggtcagtgcttcggatccagccattgcgggtgcagcgagatgaagccatctatgagtgtacagctactaacagcctgggtgagatcaacactagtgccaagctctcagtgctcgaagaggaacagctgccccctgggttcccttccatcgacatggggcctcagctgaaggtggtggagaaggcacgcacagccaccatgctatgtgccgcaggcggaaatccagaccctgagatttcttggttcaaggacttccttcctgtagaccctgccacgagcaacggccgcatcaagcagctgcgttcaggtgccttgcagatagagagcagtgaggaatccgaccaaggcaagtacgagtgtgtggcgaccaactcggcaggcacacgttactcagcccctgcgaacctgtatgtgcgagtgcgccgcgtggctcctcgtttctccatccctcccagcagccaggaggtgatgccaggcggcagcgtgaacctgacatgcgtggcagtgggtgcacccatgccctacgtgaagtggatgatgggggccgaggagctcaccaaggaggatgagatgccagttggccgcaacgtcctggagctcagcaatgtcgtacgctctgccaactacacctgtgtggccatctcctcgctgggcatgatcgaggccacagcccaggtcacagtgaaagctcttccaaagcctccgattgatcttgtggtgacagagacaactgccaccagtgtcaccctcacctgggactctgggaactcggagcctgtaacctactatggcatccagtaccgcgcagcgggcacggagggcccctttcaggaggtggatggtgtggccaccacccgctacagcattggcggcctcagccctttctcggaatatgccttccgcgtgctggcggtgaacagcatcgggcgagggccgcccagcgaggcagtgcgggcacgcacgggagaacaggcgccctccagcccaccgcgccgcgtgcaggcacgcatgctgagcgccagcaccatgctggtgcagtgggagcctcccgaggagcccaacggcctggtgcggggataccgcgtctactatactccggactcccgccgccccccgaacgcctggcacaagcacaacaccgacgcggggctcctcacgaccgtgggcagcctgctgcctggcatcacctacagcctgcgcgtgcttgccttcaccgccgtgggcgatggccctcccagccccaccatccaggtcaagacgcagcagggagtgcctgcccagcccgcggacttccaggccgaggtggagtcggacaccaggatccagctctcgtggctgctgccccctcaggagcggatcatcatgtatgaactggtgtactgggcggcagaggacgaagaccaacagcacaaggtgaccttcgacccaacctcctcctacacactagaggacctgaagcctgacacactctaccgcttccagctggctgcacgctcggatatgggggtgggcgtcttcacccccaccattgaggcccgcacagcccagtccaccccctccgcccctccccagaaggtgatgtgtgtgagcatgggctccaccacggtccgggtaagttgggtcccgccgcctgccgacagccgcaacggcgttatcacccagtactccgtggcctacgaggcggtggacggcgaggaccgcgggcggcatgtggtggatggcatcagccgtgagcactccagctgggacctggtgggcctggagaagtggacggagtaccgggtgtgggtgcgggcacacacagacgtgggccccggccccgagagcagcccggtgctggtgcgcaccgatgaggacgtgcccagcgggcctccgcggaaggtggaggtggagccactgaactccactgctgtgcatgtctactggaagctgcctgtccccagcaagcagcatggccagatccgcggctaccaggtcacctacgtgcggctggagaatggcgagccccgtggactccccatcatccaagacgtcatgctagccgaggcccaggaaaccactatcagcggcctgaccccggagaccacctactccgttactgttgctgcctataccaccaagggggatggtgcccgcagcaagcccaaaattgtcactacaacaggtgcagtcccaggccggcccaccatgatgatcagcaccacggccatgaacactgcgctgctccagtggcacccacccaaggaactgcctggcgagctgctgggctaccggctgcagtactgccgggccgacgaggcgcggcccaacaccatagatttcggcaaggatgaccagcacttcacagtcaccggcctgcacaaggggaccacctacatcttccggcttgctgccaagaaccgggctggcttgggtgaggagttcgagaaggagatcaggacccccgaggacctgcccagcggcttcccccaaaacctgcatgtgacaggactgaccacgtctaccacagaactggcctgggacccgccagtgctggcggagaggaacgggcgcatcatcagctacaccgtggtgttccgagacatcaacagccaacaggagctgcagaacatcacgacagacacccgctttacccttactggcctcaagccagacaccacttacgacatcaaggtccgcgcatggaccagcaaaggctctggcccactcagccccagcatccagtcccggaccatgccggtggagcaagtgtttgccaagaacttccgggtggcggctgcaatgaagacgtctgtgctgctcagctgggaggttcccgactcctataagtcagctgtgccctttaagattctgtacaatgggcagagtgtggaggtggacgggcactcgatgcggaagctgatcgcagacctgcagcccaacacagagtactcgtttgtgctgatgaaccgtggcagcagcgcagggggcctgcagcacctggtgtccatccgcacagcccccgacctcctgcctcacaagccgctgcctgcctctgcctacatagaggacggccgcttcgatctctccatgccccatgtgcaagacccctcgcttgtcaggtggttctacattgttgtggtgcccattgaccgtgtgggcgggagcatgctgacgccaaggtggagcacacccgaggaactggagctggacgagcttctagaagccatcgagcaaggcggagaggagcagcggcggcggcggcggcaggcagaacgtctgaagccatatgtggctgctcaactggatgtgctcccggagacctttaccttgggggacaagaagaactaccggggcttctacaaccggcccctgtctccggacttgagctaccagtgctttgtgcttgcctccttgaaggaacccatggaccagaagcgctatgcctccagcccctactcggatgagatcgtggtccaggtgacaccagcccagcagcaggaggagccggagatgctgtgggtgacgggtcccgtgctggcagtcatcctcatcatcctcattgtcatcgccatcctcttgttcaaaaggaaaaggacccactctccgtcctctaaggatgagcagtcgatcggactgaaggactccttgctggcccactcctctgaccctgtggagatgcggaggctcaactaccagaccccaggtatgcgagaccacccacccatccccatcaccgacctggcggacaacatcgagcgcctcaaagccaacgatggcctcaagttctcccaggagtatgagtccatcgaccctggacagcagttcacgtgggagaattcaaacctggaggtgaacaagcccaagaaccgctatgcgaatgtcatcgcctacgaccactctcgagtcatccttacctctatcgatggcgtccccgggagtgactacatcaatgccaactacatcgatggctaccgcaagcagaatgcctacatcgccacgcagggccccctgcccgagaccatgggtgatttctggaggatggtgtgggaacagcgcacggccactgtggtcatgatgacacggctggaggagaagtcccgggtaaaatgtgatcagtactggccagcccgtggcaccgagacctgtggccttattcaggtgaccctgttggacacagtggagctggccacatacactgtgcgcaccttcgcactccacaagagtggctccagtgagaagcgcgagctgcgtcagtttcagttcatggcctggccagaccatggagttcctgagtacccaactcccatcctggccttcctacgacgggtcaaggcctgcaaccccctagacgcagggcccatggtggtgcactgcagcgcgggcgtgggccgcaccggctgcttcatcgtgattgatgccatgttggagcggatgaagcacgagaagacggtggacatctatggccacgtgacctgcatgcgatcacagaggaactacatggtgcagacggaggaccagtacgtgttcatccatgaggcgctgctggaggctgccacgtgcggccacacagaggtgcctgcccgcaacctgtatgcccacatccagaagctgggccaagtgcctccaggggagagtgtgaccgccatggagctcgagttcaagttgctggccagctccaaggcccacacgtcccgcttcatcagcgccaacctgccctgcaacaagttcaagaaccggctggtgaacatcatgccctacgaattgacccgtgtgtgtctgcagcccatccgtggtgtggagggctctgactacatcaatgccagcttcctggatggttatagacagcagaaggcctacatagctacacaggggcctctggcagagagcaccgaggacttctggcgcatgctatgggagcacaattccaccatcatcgtcatgctgaccaagcttcgggagatgggcagggagaaatgccaccagtactggccagcagagcgctctgctcgctaccagtactttgttgttgacccgatggctgagtacaacatgccccagtatatcctgcgtgagttcaaggtcacggatgcccgggatgggcagtcaaggacaatccggcagttccagttcacagactggccagagcagggcgtgcccaagacaggcgagggattcattgacttcatcgggcaggtgcataagaccaaggagcagtttggacaggatgggcctatcacggtgcactgcagtgctggcgtgggccgcaccggggtgttcatcactctgagcatcgtcctggagcgcatgcgctacgagggcgtggtcgacatgtttcagaccgtgaagaccctgcgtacacagcgtcctgccatggtgcagacagaggaccagtatcagctgtgctaccgtgcggccctggagtacctcggcagctttgaccactatgcaacgtaactaccgctcccctctcctccgccacccccgccgtggggctccggaggggacccagctcctctgagccataccgaccatcgtccagccctcctacgcagatgctgtcactggcagagcacagcccacggggatcacagcgtttcaggaacgttgccacaccaatcagagagcctagaacatccctgggcaagtggatggcccagcaggcaggcactgtggcccttctgtccaccagacccacctggagcccgcttcaagctctctgttgcgctcccgcatttctcatgcttcttctcatggggtggggttggggcaaagcctcctttttaatacattaagtggggtagactgagggattttagcctcttccctctgatttttcctttcgcgaatccgtatctgcagaatgggccactgtaggggttggggtttattttgttttgtttttttttttcttgagttcactttggatccttattttgtatgacttctgctgaaggacagaacattgccttcctcgtgcagagctggggctgccagcctgagcggaggctcggccgtgggccgggaggcagtgctgatccggctgctcctccagcccttcagacgagatcctgtttcagctaaatgcagggaaactcaatgtttttttaagttttgttttccctttaaagcctttttttaggccacattgacagtggtgggcggggagaagatagggaacactcatccctggtcgtctatcccagtgtgtgtttaacattcacagcccagaaccacagatgtgtctgggagagcctggcaaggcattcctcatcaccatcgtgtttgcaaaggttaaaacaaaaacaaaaaaccacaaaaataaaaaacaaaaaaaacaaaaaacccaagaaaaaaaaaaagagtcagcccttggcttctgcttcaaaccctcaagaggggaagcaactccgtgtgcctggggttcccgagggagctgctggctgacctgggcccacagagcctggctttggtccccagcattgcagtatggtgtggtgtttgtaggctgtggggtctggctgtgtggccaaggtgaatagcacaggttagggtgtgtgccacaccccatgcacctcagggccaagcgggggcgtggctggcctttcaggtccaggccagtgggcctggtagcacatgtctgtcctcagagcaggggccagatgattttcctccctggtttgcagctgttttcaaagcccccgataatcgctcttttccactccaagatgccctcataaaccaatgtggcaagactactggacttctatcaatggtactctaatcagtccttattatcccagcttgctgaggggcagggagagcgcctcttcctctgggcagcgctatctagataggtaagtgggggcggggaagggtgcatagctgttttagctgagggacgtggtgccgacgtccccaaacctagctaggctaagtcaagatcaacattccagggttggtaatgttggatgatgaaacattcatttttaccttgtggatgctagtgctgtagagttcactgttgtacacagtctgttttctatttgttaagaaaaactacagcatcattgcataattcttgatggtaataaatttgaataatcagatttcttacaaaccagga

SEQ ID NO: 78 - protein, 784 aa, Human
  LRRF1P1
MTSPAAAQSREIDCLSPEAQKLAEARLAAKRAARAEAREIRMKELERQQKEEDSERYSRRSRRNTSASDEDERMSVGSRGSLRVEERPEKDFTEKGSRNMPGLSAATLASLGGTSSRRGSGDTSFSIDTEASIREIKDSLAEVEEKYKKAMVSNAQLDNEKTNFMYQVDTLKDMLLELEEQLAESRRQYEEKNKEFEREKHAHSILQFQFAEVKEALKQREEMLEKHGIILNSEIATNGETSDTLNNVGYQGPTKMTKEELNALKSTGDGTLGRASEVEVKNEIVANVGKREILHNTEKEQHTEDTVKDCVDIEVFPAGENTEDQKSSEDTAPFLGTLAGATYEEQVQSQILESSSLPENTVQVESNEVMGAPDDRTRTPLEPSNCWSDLDGGNHTENVGEAAVTQVEEQAGTVASCPLGHSDDTVYHDDKCMVEVPQELETSTGHSLEKEFTNQEAAEPKEVPAHSTEVGRDHNEEEGEETGLRDEKPIKTEVPGSPAGTEGNCQEATGPSTVDTQNEPLDMKEPDEEKSDQQGEALDSSQKKTKNKKKKNKKKKSPVPVETLKDVKKELTYQNTDLSEIKEEEQVKSTDRKSAVEAQNEVTENPKQKIAAESSENVDCPENPKIKLDGKLDQEGDDVQTAAEEVLADGDTLDFEDDTVQSSGPRAGGEELDEGVAKDNAKIDGATQSSPAEPKSEDADRCTLPEHESPSQDISDACEAESTERCEMSEHPSQTVRKALDSNSLENDDLSAPGREPGHFNPESREDTRGGNEKGKSKEDCTMS

SEQ ID NO: 79 - DNA, 3648 bp, Human
  LRRF1P1
gccgctccccggcgggctggctcctggccccggaagcgcgagcgttcacttagcggcgagtggctccgtctccgcggacagagcgcgcgccccctggcccggcccgcgaggggctcccggcgcggtccccgagcatttcccgccgggtggagcgggccgagcccggcaggatgaccagccccgcggccgctcaaagccgggagatcgactgtttgagcccggaagcgcagaagctggcggaagcccggctcgctgcaaaacgggcggcccgcgcggaggctcgcgagatccgcatgaaggagctggagcggcagcagaaggaggaagacagtgagcgctactctcgtagatccagaagaaacacatcggcttctgatgaagacgagcgcatgtcagtgggtagtcgtggaagcctgagggtagaagagagaccagaaaaagattttactgagaaggggtctcgtaacatgccgggcctgtctgcagccacgctggcctctctgggtgggacttcctctcggagaggcagcggagacacctccttctccatcgacaccgaggcatccatcagggaaatcaaggactctctagcagaagttgaagagaaatataagaaggctatggtttccaatgctcagctagacaatgaaaagacaaacttcatgtaccaggttgataccctaaaagatatgttgctggagcttgaagaacagctggctgaatctaggcggcagtacgaagagaaaaacaaagaatttgaaagggaaaaacacgcccacagtatactgcaatttcagtttgctgaagtcaaggaggccctgaagcaaagagaggaaatgctcgagaaacatggaataatcctaaattcagaaatagctaccaatggagagacttccgacaccctcaataatgttggataccaaggtcctaccaagatgacaaaagaagagttaaatgccctcaagtctacaggggatgggaccctaggaagagccagtgaagtggaggtgaaaaatgaaatcgtggcgaatgtggggaaaagagaaatcttgcacaatactgagaaagaacaacacacagaggacacagtgaaggactgtgtggacatagaggtattccctgctggtgagaataccgaggaccagaaatcctctgaagacactgccccattcctaggaaccttagcaggtgctacctatgaagaacaggttcaaagccaaattcttgagagcagttctctccctgaaaacacagtacaggttgagtcaaatgaggtcatgggtgcaccagatgacaggaccagaactccccttgagccatccaactgttggagtgacttagatggtgggaaccacacagagaatgtgggagaggcagcagtgactcaggttgaagagcaggcaggcacagtggcctcgtgtcctttagggcatagtgatgacacagtttatcatgatgacaaatgtatggtagaggtcccccaagagttagagacaagcacagggcatagtttagagaaagaattcaccaaccaggaagcagctgagcccaaggaggttccagcgcacagtacagaagtaggtagggatcacaacgaagaagagggtgaagaaacaggattaagggacgagaaaccaatcaagacagaagttcctggttctccagcaggaactgagggcaactgtcaggaagcgacaggtccaagtacagtagacactcaaaatgaacccttagatatgaaagagcccgatgaagaaaagagtgaccaacagggagaggcattggactcatcgcagaagaagacaaagaacaagaaaaagaaaaacaagaagaaaaaatccccagtacccgtagaaacccttaaagatgttaaaaaagagttaacgtatcagaacacagatttaagtgaaattaaggaagaagagcaggtaaagtctactgacagaaagtcagcagtggaagcccaaaacgaggtgactgaaaatccaaaacagaaaattgcagcagaaagcagtgaaaatgttgattgtccggagaatcctaaaattaagttggatggaaaacttgaccaagaaggtgatgatgtacaaacagcagctgaggaggtactagctgatggagacacattagattttgaggatgacaccgttcaatcatcaggcccgagggctggtggtgaagaattagatgaaggtgttgcaaaagataatgctaaaatagatggtgccactcaaagcagtcctgcagaaccaaagagcgaagacgcagatcgctgcaccctgcccgaacatgaaagtccctcacaggacattagtgatgcctgtgaagcagaaagtacagagaggtgtgagatgtcagaacatccaagtcagaccgtcaggaaagctttagacagcaatagcctagagaacgatgacttgtcggcaccaggaagagagccagggcacttcaatccagaaagcagagaagataccagaggagggaatgagaagggcaaaagcaaagaagactgtaccatgtcctaagctgaggcaggcggcaggcgcggtgcacaggaagtctcagtgtgaaggggtcttttctctccactgccaatgtaagtagaatgttctaaattcatagagaggcactgtatgacaattaccaggtgctctactgctttaagttatagactgttacttgtagatttccatgtaatcattgaggttatcacccagattagaaagacatatttgttatcagtgtacgttctaattgagagcattccagtagtatcaaacaataatgtctactgtttatagtccacttaataaaaatagaggcatttactatttgccttaggctgataggaatgtgggttttcttgaccaaatatatcagcatctaattgaaatgaccaaatagcattcttagacttctgtattatgaatataattgatatttaaattaatgtcttgttcacatatgtgtactttcatatttgattttaaaatgtacattataacctgtatggtattttatttaaaggagataaacagccaaatagcaaataggtcactgaatgataagatttgcaccttagaacaataatcattttaaggataacaagtaaatgtctgaaagcatgaggggctttatttgcctttacctcatatgagtctttgatcttgaaccgatacttttggatctcattgttgatatacctgaatttactttgtaagagattttaacttcacttcatgctgatgatgtatcaaattcattttatagaaagatttaaagtttttttctggaagtgatatatgtcaaattacatttcctactgcagtatttgagcagggacagtcattttttaaatgtttttggccgggcgtggtggctcatgcctgtaatctcagtacattgggaggccaaggcaggtggatcacctgaggtcaagagttcgaggccagcctggccaacatggtgaaaccctgtctctactaaaaatacaaaaaattggccgggcgtgatggtgggcgcctgtaatcccagccactccagaggctgaggcaggagaatcgcttgaacctgcgaggcagagattgcagtgagccaagatcaagccattgtactccagcctggacaacaagagcgaaactctgtcta

SEQ ID NO: 80 - protein, 1083 aa, Human
  DKFZP686A01247
MACPALGLEALQPLQPEPPPEPAFSEAQKWIEQVTGRSFGDKDFRTGLENGILLCELLNAIKPGLVKKINRLPTPIAGLDNIILFLRGCKELGLKESQLFDPSDLQDTSNRVTVKSLDYSRKLKNVLVTIYWLGKAANSCTSYSGTTLNLKEFEGLLAQMRKDTDDIESPKRSIRDSGYIDCWDSERSDSLSPPRHGRDDSFDSLDSFGSRSRQTPSPDVVLRGSSDGRGSDSESDLPHRKLPDVKKDDMSARRTSHGEPKSAVPFNQYLPNKSNQTAYVPAPLRKKKAEREEYRKSWSTATSPLGGERPFRYGPRTPVSDDAESTSMFDMRCEEEAAVQPHSRARQEQLQLINNQLREEDDKWQDDLARWKSRRRSVSQDLIKKEEERKKMEKLLAGEDGTSERRKSIKTYREIVQEKERRERELHEAYKNARSQEEAEGILQQYIERFTISEAVLERLEMPKILERSHSTEPNLSSFLNDPNPMKYLRQQSLPPPKFTATVETTIARASVLDTSMSAGSGSPSKTVTPKAVPMLTPKPYSQPKNSQDVLKTFKVDGKVSVNGETVHREEEKERECPTVAPAHSLTKSQMFEGVARVHGSPLELKQDNGSIEINIKKPNSVPQELAATTEKTEPNSQEDKNDGGKSRKGNIELASSEPQHFTTTVTRCSPTVAFVEFPSSPQLKNDVSEEKDQKKPENEMSGKVELVLSQKVVKPKSPEPEATLTFPFLDKMPEANQLHLPNLNSQVDSPSSEKSPVTTPQFKFWAWDPEEERRRQEKWQQEQERLLQERYQKEQDKLKEEWEKAQKEVEEEERRYYEEERKIIEDTVVPFTVSSSSADQLSTSSSMTEGSGTMNKIDLGNCQDEKQDRRWKKSFQGDDSDLLLKTRESDRLEEKGSLTEGALAHSGNPVSKGVHEDHQLDTEAGAPHCGTNPQLAQDPSQNQQTSNPTHSSEDVKPKTLPLDKSINHQIESPSERRKKSPREHFQAGPFSPCSPTPPGQSPNRSISGKKLCSSCGLPLGKGAAMIIETLNLYFHIQCFRCGICKGQLGDAVSGTDVRIRNGLLNCNDCYMRSRSAGQPTTL

SEQ ID NO: 81 - DNA, 5113 bp, Human
  DKFZP686A01247
cgacggcggcggccgtcctcatcccggcgcttgagaggacgcggggctgcgcaaatggcttgtcccgctctcggtctggaagctcttcagcccctgcagcccgagccgccccccgagcccgccttctccgaggcgcagaagtggattgagcaagtaactggcagaagttttggtgataaagattttcggacaggtttagaaaatggaatcctcctctgcgagttgctgaatgctataaagccaggacttgttaaaaagatcaatagattgcctacccccattgcaggactggacaatattatcttattcttgagaggttgtaaagagctcggccttaaagaatctcaactttttgacccgagtgacctccaggatacatccaacagagtaacagtcaagagccttgattatagtaggaagctgaaaaatgtattagttaccatttactggctgggaaaagcagcaaacagctgcacatcctacagcggaacgacactaaacctgaaggagtttgaaggattgttggctcagatgcgaaaggacactgatgacattgaaagtcctaaacgcagtatccgagacagtggctacatcgactgctgggattccgagcgcagcgactccctctctcctcctcgccacggcagagatgattccttcgacagcctggattcctttggctctcgctctcggcagacgccttcaccagatgtagtcctcaggggaagcagcgatgggagaggaagcgactctgaatccgacttgcctcatcggaagctgccagatgtgaagaaggatgacatgtctgcacggcggacttcccatggtgagccgaaatcagcagtgccttttaaccagtacctcccgaacaaaagcaatcagacggcctacgtccccgcgcctctgagaaagaagaaagcagagagagaggaataccgcaagagctggagtaccgccacctccccgctgggtggggagaggcccttcagatacggtccgagaactcctgtgtctgatgacgcagagagcaccagcatgtttgacatgcggtgtgaggaggaggccgcggtgcagccgcacagcagggcccgccaggagcagctgcagctgataaataaccagctgagggaagaggacgacaaatggcaagatgacctggctcgttggaagagtcgtagaagaagtgtttctcaggacttaatcaagaaagaggaagaaaggaaaaaaatggagaagttactggctggagaagatgggacaagtgaacgaaggaaaagcatcaaaacctacagagaaattgttcaagaaaaagagcggagagagagagagctgcatgaagcatataagaacgctcggtcccaggaggaggcagaggggatccttcaacagtacattgagaggttcaccatcagtgaggctgttctcgaacgcttggagatgccaaaaattctggaaagaagccattcaacagagccaaatttatcctccttcctgaatgaccccaatcccatgaaatacctgcggcaacagtcactgcctccacccaaattcactgccactgttgaaaccaccattgctcgtgccagtgttctggataccagcatgtcagcaggcagtgggtctccaagcaaaactgtcactcccaaagcagtgcctatgctgacacccaagccttactcccagcccaaaaattctcaagatgttctgaagacctttaaggtagacgggaaagtcagtgtgaatggagagacggttcatagagaggaggagaaggaaagagagtgtcccacggtggcacctgcccactccttaaccaaatcccagatgtttgaaggtgtggccagagtgcacgggtctccactggagctgaaacaagacaacggtagcatcgagatcaacataaagaagccaaactctgttccccaagagctcgcagcaaccactgagaaaacggaaccgaatagtcaagaggacaagaatgatggtggaaaatcaagaaaagggaatatagaacttgcctcatcagaaccacagcattttacaacaactgtgactcgatgcagcccgaccgtggcctttgtggaatttccctccagcccccagctgaagaatgatgtgtcggaagaaaaagaccagaagaaaccagaaaatgaaatgagtggaaaggtggagttggtgctgtcacaaaaggtggtaaagccaaaatctccagaacccgaagcaacgctgacatttccatttctggacaaaatgcctgaagccaaccaactacatttgccaaatctcaattctcaagtggattctccaagcagtgagaagtcacctgttacgacacctcagtttaagttctgggcatgggacccagaagaggagcgcaggcgacaggaaaaatggcaacaggaacaggaacgtttgctccaggagagataccagaaggagcaggacaagctgaaagaagagtgggaaaaggcccaaaaggaggtggaagaggaagaacgcagatactatgaggaggagcgtaagataattgaagacactgtggttccatttactgtttcttcaagttccgctgaccagctgtctacctcttcctccatgactgaaggcagtgggacaatgaataagatagacctgggaaactgtcaagatgaaaaacaagacagaagatggaagaaatcattccagggagatgacagtgacttattgctgaagactagggaaagtgatcgactggaggagaagggcagcctaactgaaggggccttggctcattctgggaaccctgtatcaaaaggagtccatgaagaccatcagctggataccgaggctggggccccacactgtggaacaaacccacagcttgctcaggatccatcccagaatcagcagacatcaaatccaacgcacagttcagaagatgtgaagccaaaaaccctcccgctggataaaagcattaaccatcagatcgagtctcccagtgaaaggcggaagaaaagtccccgagagcacttccaggctgggcctttctctccctgttctcccacccctcccggtcagtcaccaaacaggtctataagtggaaagaagctgtgctcttcctgtgggcttcctttgggtaaaggagctgcaatgatcatcgagaccctcaatctctattttcacatccagtgtttcaggtgtggaatttgtaaaggccagcttggagatgcagtgagtgggacggatgttaggattcgaaatggtctcctgaactgtaatgattgctacatgcgatccagaagtgccgggcagcctacaacattgtgacacggctttcaagcttccggatcactcaccatttctttactgagagtgtcccctggcaactgcttaacaaaatcccaagctcaggggcttctcagcatttacctaatttctgaaaggctcttctgaaaggtggtatctgttctttcgtagcacagtgtttatgtttttcctgtttattgttttggtttttttttttttttgcatttgcacagtatacacaaaagaatatggggttgtaatgatcctgaatagctcaaaaaaggttttagcatggtcaaacaggcttatggtttaaaatgtgttattctcttctttgggaattagctaaatgatgcaataaacctgttttgttttagaatgtctaggaattaaacactttatgtttacagaattgagctgcagaaagtgcaagacatgccaatttgagacacacggtcttctaagactgaaggataaatttaatgcatttcagaaactaaacatcacagcaagctctatctctgagctataatttgtttttaatgcaaagacactagtttgataatatatactgtaatcctgaaacatttgtgttacttacctttggaggtagaaattataccaataaattattgcaccgttagtattagattctgtgtaccttggaagttatgtcattaatataggctggttcatcaaataaagcaaaaccttgcaatatcagctagatttacactccgggacgttgcccaaaggtaggaagaaagcagagggaaatatttcagtcatcatttccaaagtcattatcaaaatctgtgaggaagtttaatcttccaaagagtcaatgtcagacatcaggcctctgttgcctgcttctctcgaggcactagattaggagtcttcaataagagacttaacatgaggtatatggaagatgaggcaccgagataagttcatcattaggtgtgagcactgctcacccttgctggcaagttctccttaagggcctgaagcacaggtgtccaaagaaaagcgttaagtccatcttaatagaatctatgtggtatatgatgtggtcagcccctggtctgtgatcagcaagaacctacagcacagattatgccctgcccacttcaatgaatacctactctcctccattctccatcactttttttgctatcaagaactccggaccttgcccatggagaagtttagagaggaactcttgtggagagctggtttattttctgccctgtgcgacgagtttcagctggccaagaaaggagtcaagttattaaaaagcatcacaatgtagatctccaggctggttttttgttttttgttgttaagactggggaaagggggactatttattctgccttaaatcaatggcaaataagtcaagatgacattttgtgaatgtagactatggatacactcctaatagattgatgtagtcataaaagggggtcaagtagatgtttttctgttatgtaagcaataatttttccgtgtcttattgagtatggctagcgattatttattacatgctagatgggttctttgcatgtgggttccatataggtgcagaaatttcctcagccactggagggatttcgaccatatttgtcatttggatgagctgttattagattgaaatctacacatcatttcattaaaaattgtgccttagaaaacgcaaagctgttgcacatggcgataaattatggatgcagtacattgaagagagatgaagtcacttccaagtttccaagacttctcatggaggtgtttgctgttttacaggaaaaaataaaaataaaaaaag

SEQ ID NO: 82 - protein, 310 aa, Human
  PSMD14
MDRLLRLGGGMPGLGQGPPTDAPAVDTAEQVYISSLALLKMLKHGRAGVPMEVMGLMLGEFVDDYTVRVIDVFAMPQSGTGVSVEAVDPVFQAKMLDMLKQTGRPEMVVGWYHSHPGFGCWLSGVDINTQQSFEALSERAVAVVVDPIQSVKGKVVIDAFRLINANMMVLGHEPRQTTSNLGHLNKPSIQALIHGLNRHYYSITINYRKNELEQKMLLNLHKKSWMEGLTLQDYSEHCKHNESVVKEMLELAKNYNKAVEEEDKMTPEQLAIKNVGKQDPKRHLEEHVDVLMTSNIVQCLAAMLDTVVFK

SEQ ID NO: 83 - DNA, 1277 bp, Human
  PSMD14
gcttcgcggcggaggcccgggcaactcttttgaatggaatcgggctgattcatcgccggtttgcagacagagccgcgtcgggtgtgcgccgctgctgctgttgcctctgtcttcgcgtcaccacagaggcaagacaagggtccatatcgcggcatccggctcccgcccgtcttcaggagagaaagaaaaaataaaatatacttggggaagttgtacctgccagaattagcaagagctttctttaagaagacatttgtcaaactcaacaaattgaaggttaacaccttaagagttgtagttactgaccagaaatatggacagacttcttagacttggaggaggtatgcctggactgggccaggggccacctacagatgctcctgcagtggacacagcagaacaagtctatatctcttccctggcactgttaaaaatgttaaaacatggccgtgctggagttccaatggaagttatgggtttgatgcttggagaatttgttgatgattataccgtcagagtgattgatgtgtttgctatgccacagtcaggaacaggtgtcagtgtggaggcagttgatccagtgttccaagctaaaatgttggatatgttgaagcagacaggaaggccggagatggttgttggttggtatcacagtcaccctggctttggttgttggctttctggtgtggatatcaacactcagcagagctttgaagccttgtcggagagagctgtggcagtggttgtggatcccattcagagtgtaaaaggaaaggttgttattgatgccttcagattgatcaatgctaatatgatggtcttaggacatgaaccaagacaaacaacttcgaatctgggtcacttaaacaagccatctatccaggcattaattcatggactaaacagacattattactccattactattaactatcggaaaaatgaactggaacagaagatgttgctaaatttgcataagaagagttggatggaaggtttgacacttcaggactacagtgaacattgtaaacacaatgaatcagtggtaaaggagatgttggaattagccaagaattacaataaggctgtagaagaagaagataagatgacacctgaacagctggcaataaagaatgttggcaagcaggaccccaaacgtcatttggaggaacatgtggatgtacttatgacctcaaatattgtccagtgtttagcagctatgttggatactgtcgtatttaaataaagcaacgaaaaacgccaaaaaaaaaaaaaaa

SEQ ID NO: 84 - DNA, 5793 bp, Human
  CLIP1
gctgctgctgcagtgggacaggtggcggcgaccggcggcgtccgaggagatttaatccagagactgacttcactatagaacccacagttgtatcaatggttggggaaagatagtggcaacaggcaaaggagaaacagctctgacatacaaagaaaatgagtatgctaaagccaagtgggcttaaggcccccaccaagatcctgaagcctggaagcacagctctgaagacacctacggctgttgtagctccagtagaaaaaaccatatccagtgaaaaagcatcaagcactccatcatctgagactcaggaggaatttgtggatgactttcgagttggggagcgagtttgggtgaatggaaataagcctggatttatccagtttcttggagaaacccagtttgcaccaggccagtgggctggaattgttttagatgaacccataggcaagaacgatggttcggtggcaggagttcggtatttccagtgtgaacctttaaagggcatatttacccgaccttcaaagttaacaaggaaggtgcaagcagaagatgaagctaatggcctgcagacaacgcccgcctcccgagctacttcaccgctgtgcacttctacggccagcatggtgtcttcctccccctccaccccttcaaacatccctcagaaaccatcacagccagcagcaaaggaaccttcagctacgcctccgatcagcaaccttacaaaaactgccagtgaatctatctccaacctttcagaggctggctcaatcaagaaaggagaaagagagctcaaaatcggagacagagtattggttggtggcactaaggctggtgtagtccggtttcttggggagaccgactttgccaagggggagtggtgtggcgtggagttagatgagccacttgggaagaatgatggcgctgttgctggaacaaggtattttcagtgtcaacccaaatatggcttgttcgctcctgtccacaaagttaccaagattggcttcccttccactacaccagccaaagccaaggccaacgcagtgaggcgagtgatggcgaccacgtccgccagcctgaagcgcagcccttctgcctcttccctcagctccatgagctcagtggcctcctctgtgagcagcaggcccagtcggacaggactattgactgaaacctcctcccgttacgccaggaagatctccggtaccactgccctccaggaggccctgaaggagaagcagcagcacattgagcagctgctggcggaacgggatctggagagggcggaggtggccaaggccacgagccacgtgggggagatagagcaggagctagctctggcccgggacggacatgaccagcatgtcctggaattggaagccaaaatggaccagctgcgaacaatggtggaagctgctgacagggagaaggtggagcttctcaaccagcttgaagaggagaaaaggaaggttgaggaccttcagttccgggttgaagaagaatcaattaccaaaggtgatcttgaggtggctacagtttcagaaaagtcacgtataatggaactggagaaagacctagcattgagagtacaggaagtagctgagctccgaagaaggctagagtccaataagcctgctggggatgtggacatgtcactttcccttttgcaagagataagctctttgcaagaaaagttagaagtcacccgtactgaccaccagagagaaataacttctctgaaggagcattttggagcccgggaagaaactcatcagaaggagataaaggctctgtataccgccacggaaaagctttccaaagagaacgagtcattgaaaagcaagctggagcatgccaacaaagagaactcagatgtgatagctctatggaagtccaaactggagactgccatcgcatcccaccagcaggcgatggaagaactgaaggtatctttcagcaaagggcttggaacagagacggcagaatttgctgaactaaaaacacaaatagagaaaatgagactagattaccaacacgaaatagaaaatttgcagaatcaacaagactctgaacgggctgcccatgctaaagagatggaagccttgagggctaaactgatgaaagttattaaagaaaaggaaaacagtctggaagccatcaggtcgaaactggacaaagcagaagaccagcatctcgtagaaatggaagacacgttaaacaaattacaggaagctgaaataaaggtaaaggagctagaggtactgcaagccaaatgcaatgaacaaaccaaggttattgataattttacatcacagctcaaggctactgaagaaaagctcttggatcttgatgcacttcggaaagccagttccgaaggtaaatcggaaatgaagaaacttagacagcagcttgaggcagctgagaaacagattaaacatttagagattgaaaagaatgctgaaagtagcaaggctagtagcattaccagagagctccaggggagagagctaaagcttactaaccttcaggaaaatttgagtgaagtcagtcaagtgaaagagactttggaaaaagaacttcagattttgaaagaaaagtttgctgaagcttcagaggaggcagtctctgttcagagaagtatgcaagaaactgtaaataagttacaccaaaaggaggaacagtttaacatgctgtcttctgacttggagaagctgagagaaaacttagcagatatggaggcaaaatttagagagaaagatgagagagaagagcagctgataaaggcaaaggaaaaactggaaaatgacattgcagaaataatgaagatgtcaggagataactcttctcagctgacaaaaatgaacgatgaattacgtctgaaagaaagagatgtagaagaattacagctaaaacttacaaaggctaatgaaaatgcaagttttctgcaaaaaagtattgaggacatgactgtcaaagctgaacagagccagcaagaagcagctaaaaagcatgaggaagaaaagaaagaattggagaggaaattgtcggacctggaaaagaaaatggaaacaagccacaaccagtgtcaggagctgaaagccaggtatgagagagccacttctgagacaaaaaccaagcatgaagaaatcctacagaacctccagaagacgctgctggacacagaggacaagctgaagggcgcacgggaggagaacagtggcttgctgcaggagctggaggagctgagaaagcaagccgacaaagccaaagctgctcaaacagcggaagatgccatgcagataatggaacagatgaccaaagagaagactgagactctggcctccttggaggacaccaagcaaacaaatgcaaaactacagaatgaattggacacacttaaagaaaacaacttgaaaaatgtggaagagctgaacaaatcaaaagaactcctgactgtagagaatcaaaaaatggaagaatttaggaaagaaatagaaaccctaaagcaggcagcagctcagaagtcccagcagctttcagcgttgcaagaagagaacgttaaacttgctgaggagctggggagaagcagggacgaagtcacaagtcatcaaaagctggaagaagaaagatctgtgctcaataatcagttgttagaaatgaaaaaaagagaatccaagttcataaaagacgcagatgaagagaaagcttccttgcagaaatccatcagtataactagtgccttactcacagaaaaggatgccgagctggagaaactgagaaatgaggtcacagtgctcaggggagaaaacgcctctgccaagtccttgcattcagttgttcagactctagagtctgataaggtgaagctcgagctcaaggtaaagaacttggagcttcaactcaaagaaaacaagaggcagctcagcagctcctcaggtaatacagacactcaggcagacgaggatgaaagagcccaggagagtcagattgatttcctaaattcagtaatagtggaccttcaaaggaagaatcaagacctcaagatgaaggtggagatgatgtcagaagcagccctgaatgggaacggggatgacctaaacaattatgacagtgatgatcaggagaaacagtccaagaagaaacctcgcctcttctgtgacatttgtgactgctttgatctccacgacacagaggattgtcctacccaggcacagatgtcagaggaccctccccattccacacaccatggcagtcggggtgaggaacgcccatactgtgaaatctgtgagatgtttggacactgggccaccaactgcaatgacgacgaaaccttctgatgaagcctccagtggagaactgggcttgctcagacgcactcgcattgacacaacgtaacaccagcattgtgtgtgcagacttcaggagaactcatgttattttttaaccccgtcaacaaatctaggaaaatattttgatcttcaacaaattgccctttagtctccccgtatgagttagaataataaatatttagtaggtgagttttcacctcgaattttgttttcttgatttttacgtttgaagacattgcaccagatgccattacatttattggccccccgaccttgtagaaaaacccctaccctcacaataccttatttaagtaactttaaattatgccgttacttttcatatttgcactaagatatttccaggctgcatttgtatatttagattttttggttaagctttgacactggaatgagttgaaaaaatgtgccattttgcattttcatctactcatttaaagtattttattcttattcaaagaaatatctgagctctttgcactacctgttatcagtagtgcctttacttcaggcttgataatacttaggtgtgattataaaatcatgaagcaggtaaagggaggggcaagcccccaaactgctgtggggacattttataatctatatgctgcacccacttaatctactgtggtgttttgtttattagttttgcataatttcagcttctatatattgtatgtatatattttttaaaaatctatattttgggaaaaaaacatacacaatgtgtctttctttttggacatttacctttttgaaaaagaaaacacttaaaatgatcattaggacataacagactaggccagacatagcatcttgtggctttgcaaccattttcatttgtttgttttccttttatttcttcaccagatttaaataactggaggaattttctccaatttttttttccttctctggcaggtatccccagcagtcaattaacaataagccagtataaaacacctaaataaccaatctacaatctcccttcacaagtttttttactgtttttagatgaatgtacgatgagaaattcaacgttaataattctggattttcttatcacaaaaaagaaaatgaaggacctcaaagcacctgaacagtttatcgaccagtttgaatctatttatcttcatttgaatgtcttctagaatatgtaaaaagtcataaaatgtatcttccatgctacatgtacaataagaacttctataattgtatatatgcctttgatgtattttcccctcaagattatcaactgtgtgttcgacagtgaatattcaatctggtaccagttgaaatttttggttataaatgtaatacgaattgtttcacaaacagaaaacatgtaaagcagtattaaaatttggccaaacaagtgttctgtatctactttaataaatggttattctttaaaaaaaaaaaaaaaaaa

SEQ ID NO: 85 - DNA, 3187 bp, Human
  DARS2
ggttctggccgcgggagcctctcgagaagcgtggaaagaggagaagggcgtataccttgtgaccgcctctggttgtcttgggctcgcgcctggcgccgctacgtggagtcgctctctcgtcgtcacttttggctgccgacttgttgagtagaagtgcagactgatgctttaagactcagggagaggtctttcccttatctccaccccagcaagcaccccagagaccttggagatttgtcttgtttctagacacgtgtactccaatgttgtgcggaggaggccttaaatattcgagaagagagtgggaactcctggaattttaagggatttctgtgtatttccaaaactgacttttaactaccggcagcgtgggatttcgtgattgtttttcgccatcgtgtggctccaacatgtacttcccttcttggttaagtcagctgtacaggggtttatccagacccatcagaaggaccacccaaccgatctggggttctctctacagaagtctgttgcagagttcacagaggagaattccagaattcagtagctttgttgtccggaccaacacatgtggagagttgcgttcgtctcacttaggccaagaagtcaccttgtgtggatggattcagtaccgaaggcaaaacacattcttggtcctaagagatttcgatgggcttgttcaagttatcattccccaggatgagtcggcagcctctgtgaagaagattttatgtgaagcccctgtggaatctgtggtgcaagtgtctggtacagtcatttcccgtcctgcaggacaagagaatccaaaaatgccaacaggtgagattgaaatcaaagttaaaacagctgagcttctgaatgcctgcaagaagctgccctttgaaattaagaacttcgtgaagaaaacagaggctcttcggttgcagtatcgctacttagacttgcgtagtttccaaatgcagtataacctgcgactgaggtcccagatggtcatgaaaatgcgggaatatctctgtaatctgcatgggtttgtggatatagaaacccccacattgtttaagaggaccccagggggtgccaaagagtttttagtaccatccagggaacctggaaagttttattctctccctcagagtcctcaacagtttaagcaacttctgatggttggcggtttagacagatattttcaggttgcccgatgttatcgagatgaaggttcaagaccagacagacagcctgagtttactcagattgacatagagatgtcatttgtagaccagactgggatccagagtttaattgagggtttgctccagtattcctggcccaatgacaaagatcctgtggttgttccttttcctactatgacttttgctgaggtgctggccacctatggaactgataaacctgacactcgctttggaatgaagattatagatatcagtgatgtgtttagaaacacagagattggatttcttcaagatgcacttagtaagccccatggaactgtgaaagccatatgtatccctgaaggagcaaaatacttaaaaaggaaagacattgaatccattagaaactttgcagctgaccattttaatcaggaaatcttacctgtattccttaacgccaatagaaactggaattctccagttgctaatttcataatggagtcacaaagactggaattaatcagactaatggagacccaagaggaagatgtggtcctactaactgctggagagcacaataaagcatgctctttgttaggaaaattacgactggaatgtgctgaccttctagaaacaagaggagtggtgctccgtgaccccactctgttctctttcctttgggtggtagatttcccactcttcctgcccaaggaggaaaatcccagagagctggaatcggcccaccacccatttactgctccccaccccagtgacatacatctcctgtacactgagcccaaaaaggcccgtagccaacactatgacttggttttaaatggcaatgaaataggaggtggttcaattcgaattcacaatgcagagctgcagcgttatatcctggcaaccttactaaaggaggatgtgaaaatgctctcccatctgctccaggctttagattatggggcaccccctcatggaggaattgccttagggttagacagactgatatgccttgtcactggatctccaagcatcagagatgtcatagccttcccaaagtccttccggggacatgacctcatgagcaataccccagattctgtccctcctgaggaactgaagccctatcatatccgagtctccaagccaacagactccaaagcagaaagagctcattgaatcatgcataccatgcagaaagttgagcttttaggttttgtcctctttgcttccccaaggctaaagtcagatctagagttctgccacaggtctaacaatcaagtctttagatggaaggaatccaggcaacattcttcaccacaacgaagaaacagataaaagatacccaattttgacttgatttcatgcatcatttggattttttttggttaggactttttttgaagttcctttttacttaggtgtgaaagatggttctttgttgaaataatatagtggtttagtgttttcaaatcatgtttctcatacccagatagtagattattcacttaggacagaggtaatcaaattatgtgtgaaatgtaggaaaatgcttgcccctgtaaactagtgagttgatggagcatttgcttcatcatcctcatcaagagaatcatataaattaagctttataatgacatttcaaccatcaacataatatagtgaggagtagcataatattttttaataatgcagaaaacatcactgaaatgagagtcacaaatttttcttcagtgtttcagcctgagtaagttacataaacctcgcttagcctcccttcctgctaatgtgtaaaatacatacttgccctggctacctcaccgggctgttattgctggaatcagaggagataacatatatggaagataaagtgaataaaagtactttgaaaaactataaagcattccacaaatatgagatgatggtattatccatccataaataggtagatatatctctattttatagtttcagattaaacaaaactgatatcaatagtaaaagtcattttacttatc

SEQ ID NO: 86 - DNA, 4930 bp, Human
  KTN1
gaagccgcccgtttcctgccgagcggcgcgacggcacctgagcgactgcggcggcggcggcggcggcggcggcgcctcggagcgggcggcccgggctgtagtgccggcgccgccgcgtcttcccggtctcctttcccggccgcacagggtagattttcgttccgtcacccaggctggagtgcagtggtgtgaccttggcttgctgcaaccctttgcctcctgggttcaagtgattctcattgcctcagcctcctaagtagctgggattacaggttttataggatcacattgacaaaagtaccatggagttttatgagtcagcatattttattgttcttattccttcaatagttattacagtaattttcctcttcttctggcttttcatgaaagaaacattatatgatgaagttcttgcaaaacagaaaagagaacaaaagcttattcctaccaaaacagataaaaagaaagcagaaaagaaaaagaataaaaagaaagaaatccagaatggaaacctccatgaatccgactctgagagtgtacctcgagactttaaattatcagatgctttggcagtagaagatgatcaagttgcacctgttccattgaatgtcgttgaaacttcaagtagtgttagggaaagaaaaaagaaggaaaagaaacaaaagcctgtgcttgaagagcaggtcatcaaagaaagtgacgcatcaaagattcctggcaaaaaagtagaacctgtcccagttactaaacagcccacccctccctctgaagcagctgcctcgaagaagaaaccagggcagaagaagtctaaaaatggaagcgatgaccaggataaaaaggtggaaactctcatggtaccatcaaaaaggcaagaagcattgcccctccaccaagagactaaacaagaaagtggatcagggaagaagaaagcttcatcaaagaaacaaaagacagaaaatgtcttcgtagatgaaccccttattcatgcaactacttatattcctttgatggataatgctgactcaagtcctgtggtagataagagagaggttattgatttgcttaaacctgaccaagtagaagggatccagaaatctgggactaaaaaactgaagaccgaaactgacaaagaaaatgctgaagtgaagtttaaagattttcttctgtccttgaagactatgatgttttctgaagatgaggctctttgtgttgtagacttgctaaaggagaagtctggtgtaatacaagatgctttaaagaagtcaagtaagggagaattgactacgcttatacatcagcttcaagaaaaggacaagttactcgctgctgtgaaggaagatgctgctgctacaaaggatcggtgtaagcagttaacccaggaaatgatgacagagaaagaaagaagcaatgtggttataacaaggatgaaagatcgaattggaacattagaaaaggaacataatgtatttcaaaacaaaatacatgtcagttatcaagagactcaacagatgcagatgaagtttcagcaagttcgtgagcagatggaggcagagatagctcacttgaagcaggaaaatggtatactgagagatgcagtcagcaacactacaaatcaactggaaagcaagcagtctgcagaactaaataaactacgccaggattatgctaggttggtgaatgagctgactgagaaaacaggaaagctacagcaagaggaagtccaaaagaagaatgctgagcaagcagctactcagttgaaggttcaactacaagaagctgagagaaggtgggaagaagttcagagctacatcaggaagagaacagcggaacatgaggcagcacagcaagatttacagagtaaatttgtggccaaagaaaatgaagtacagagtctgcatagtaagcttacagataccttggtatcaaaacaacagttggagcaaagactaatgcagttaatggaatcagagcagaaaagggtgaacaaagaagagtctctacaaatgcaggttcaggatattttggagcagaatgaggctttgaaagctcaaattcagcagttccattcccagatagcagcccagacctccgcttcagttctagcagaagaattacataaagtgattgcagaaaaggataagcagataaaacagactgaagattctttagcaagtgaacgtgatcgtttaacaagtaaagaagaggaacttaaggatatacagaatatgaatttcttattaaaagctgaagtgcagaaattacaggccctggcaaatgagcaggctgctgctgcacatgaattggagaagatgcaacaaagtgtttatgttaaagatgataaaataagattgctggaagagcaactacaacatgaaatttcaaacaaaatggaagaatttaagattctaaatgaccaaaacaaagcattaaaatcagaagttcagaagctacagactcttgtttctgaacagcctaataaggatgttgtggaacaaatggaaaaatgcattcaagaaaaagatgagaagttaaagactgtggaagaattacttgaaactggacttattcaggtggcaactaaagaagaggagctgaatgcaataagaacagaaaattcatctctgacaaaagaagttcaagacttaaaagctaagcaaaatgatcaggtttcttttgcctctctagttgaagaacttaagaaagtgatccatgagaaagatggaaagatcaagtctgtagaagagcttctggaggcagaacttctcaaagttgctaacaaggagaaaactgttcaggatttgaaacaggaaataaaggctctaaaagaagaaataggaaatgtccagcttgaaaaggctcaacagttatctatcacttccaaagttcaggagcttcagaacttattaaaaggaaaagaggaacagatgaataccatgaaggctgttttggaagagaaagagaaagacctagccaatacagggaagtggttacaggatcttcaagaagaaaatgaatctttaaaagcacatgttcaggaagtagcacaacataacttgaaagaggcctcttctgcatcacagtttgaagaacttgagattgtgttgaaagaaaaggaaaatgaattgaagaggttagaagccatgctaaaagagagggagagtgatctttctagcaaaacacagctgttacaggatgtacaagatgaaaacaaattgtttaagtcccaaattgagcagcttaaacaacaaaactaccaacaggcatcttcttttccccctcatgaagaattattaaaagtaatttcagaaagagagaaagaaataagtggtctctggaatgagttagattctttgaaggatgcagttgaacaccagaggaagaaaaacaatgaccttcgggagaaaaactgggaagcaatggaagcattggcatcaactgaaaaaatgctgcaggacaaagtgaacaagacttccaaggaaaggcagcaacaggtggaagctgttgagttggaggctaaagaagttctcaaaaaattatttccaaaggtgtctgtcccttctaatttgagttatggtgaatggttgcatggatttgaaaaaaaggcaaaagaatgtatggctggaacttcagggtcagaggaggttaaggttctagagcacaagttgaaagaagctgatgaaatgcacacattgttacagctagagtgtgaaaaatacaaatccgtccttgcagaaacagaaggaattttacagaagctacagagaagtgttgagcaagaagaaaataaatggaaagttaaggtcgatgaatcacacaagactattaaacagatgcagtcatcatttacatcttcagaacaagagctagagcgattaagaagcgaaaataaggatattgaaaatctgagaagagaacgagaacatttggaaatggaactagaaaaggcagagatggaacgatctacctatgttacagaagtcagagagctgaaagatctgttgactgaattgcagaaaaaacttgatgattcatattctgaagcagtaagacagaatgaagagctaaatttgttgaaggcacagttaaatgaaacactcacaaaacttagaactgaacaaaatgaaagacagaaggtagctggtgatttgcataaggctcaacagtcactggagcttatccagtcaaaaatagtaaaagctgctggagacactactgttattgaaaatagtgatgtttccccagaaacggagtcttctgagaaggagacaatgtctgtaagtctaaatcagactgtaacacagttacagcagttgcttcaggcggtaaaccaacagctcacaaaggagaaagagcactaccaggtgttagagtgatcatcctctggcctaccttgacacatgctctccttcaaaatgctaattcagagtgaagtaattgggaaactgttcatttgaggataaaaaaggcattgtattatattttgccaaattaaagccttatttatgttttcaccctttctactttgtcagaaacactgaacagagttttgtcttttctaatccttgttagactactgatttaaagaaggaaaaaaaaaagccaactctgtagacaccttcagagtttagttttataataaaaactgtttgaataattagacctttacattcctgaagataaacatgtaatcttttatcttattttgctcaataaaattgttcagaagatcaaagtggtaaagacaatgtaaaatttaacattttaatactgatgttgtacactgttttacttaacattttgggaagtaactgcctctgacttcaactcaagaaaacacttttttgttgctaatgtaatcggtttttgtaatggcgtcagcaaataaaaggatgcttattattcaaacttgaaaaaaaaaaaaaaaaaa

SEQ ID NO: 87 - DNA, 10316 bp, Human
  CENPF
gagaccagaagcgggcgaattgggcaccggtggcggctgcgggcagtttgaattagactctgggctccagcccgccgaagccgcgccagaactgtactctccgagaggtcgttttcccgtccccgagagcaagtttatttacaaatgttggagtaataaagaaggcagaacaaaatgagctgggctttggaagaatggaaagaagggctgcctacaagagctcttcagaaaattcaagagcttgaaggacagcttgacaaactgaagaaggaaaagcagcaaaggcagtttcagcttgacagtctcgaggctgcgctgcagaagcaaaaacagaaggttgaaaatgaaaaaaccgagggtacaaacctgaaaagggagaatcaaagattgatggaaatatgtgaaagtctggagaaaactaagcagaagatttctcatgaacttcaagtcaaggagtcacaagtgaatttccaggaaggacaactgaattcaggcaaaaaacaaatagaaaaactggaacaggaacttaaaaggtgtaaatctgagcttgaaagaagccaacaagctgcgcagtctgcagatgtctctctgaatccatgcaatacaccacaaaaaatttttacaactccactaacaccaagtcaatattatagtggttccaagtatgaagatctaaaagaaaaatataataaagaggttgaagaacgaaaaagattagaggcagaggttaaagccttgcaggctaaaaaagcaagccagactcttccacaagccaccatgaatcaccgcgacattgcccggcatcaggcttcatcatctgtgttctcatggcagcaagagaagaccccaagtcatctttcatctaattctcaaagaactccaattaggagagatttctctgcatcttacttttctggggaacaagaggtgactccaagtcgatcaactttgcaaatagggaaaagagatgctaatagcagtttctttgacaattctagcagtcctcatcttttggatcaattaaaagcgcagaatcaagagctaagaaacaagattaatgagttggaactacgcctgcaaggacatgaaaaagaaatgaaaggccaagtgaataagtttcaagaactccaactccaactggagaaagcaaaagtggaattaattgaaaaagagaaagttttgaacaaatgtagggatgaactagtgagaacaacagcacaatacgaccaggcgtcaaccaagtatactgcattggaacaaaaactgaaaaaattgacggaagatttgagttgtcagcgacaaaatgcagaaagtgccagatgttctctggaacagaaaattaaggaaaaagaaaaggagtttcaagaggagctctcccgtcaacagcgttctttccaaacactggaccaggagtgcatccagatgaaggccagactcacccaggagttacagcaagccaagaatatgcacaacgtcctgcaggctgaactggataaactcacatcagtaaagcaacagctagaaaacaatttggaagagtttaagcaaaagttgtgcagagctgaacaggcgttccaggcgagtcagatcaaggagaatgagctgaggagaagcatggaggaaatgaagaaggaaaacaacctccttaagagtcactctgagcaaaaggccagagaagtctgccacctggaggcagaactcaagaacatcaaacagtgtttaaatcagagccagaattttgcagaagaaatgaaagcgaagaatacctctcaggaaaccatgttaagagatcttcaagaaaaaataaatcagcaagaaaactccttgactttagaaaaactgaagcttgctgtggctgatctggaaaagcagcgagattgttctcaagaccttttgaagaaaagagaacatcacattgaacaacttaatgataagttaagcaagacagagaaagagtccaaagccttgctgagtgctttagagttaaaaaagaaagaatatgaagaattgaaagaagagaaaactctgttttcttgttggaaaagtgaaaacgaaaaacttttaactcagatggaatcagaaaaggaaaacttgcagagtaaaattaatcacttggaaacttgtctgaagacacagcaaataaaaagtcatgaatacaacgagagagtaagaacgctggagatggacagagaaaacctaagtgtcgagatcagaaaccttcacaacgtgttagacagtaagtcagtggaggtagagacccagaaactagcttatatggagctacagcagaaagctgagttctcagatcagaaacatcagaaggaaatagaaaatatgtgtttgaagacttctcagcttactgggcaagttgaagatctagaacacaagcttcagttactgtcaaatgaaataatggacaaagaccggtgttaccaagacttgcatgccgaatatgagagcctcagggatctgctaaaatccaaagatgcttctctggtgacaaatgaagatcatcagagaagtcttttggcttttgatcagcagcctgccatgcatcattcctttgcaaatataattggagaacaaggaagcatgccttcagagaggagtgaatgtcgtttagaagcagaccaaagtccgaaaaattctgccatcctacaaaatagagttgattcacttgaattttcattagagtctcaaaaacagatgaactcagacctgcaaaagcagtgtgaagagttggtgcaaatcaaaggagaaatagaagaaaatctcatgaaagcagaacagatgcatcaaagttttgtggctgaaacaagtcagcgcattagtaagttacaggaagacacttctgctcaccagaatgttgttgctgaaaccttaagtgcccttgagaacaaggaaaaagagctgcaacttttaaatgataaggtagaaactgagcaggcagagattcaagaattaaaaaagagcaaccatctacttgaagactctctaaaggagctacaacttttatccgaaaccctaagcttggagaagaaagaaatgagttccatcatttctctaaataaaagggaaattgaagagctgacccaagagaatgggactcttaaggaaattaatgcatccttaaatcaagagaagatgaacttaatccagaaaagtgagagttttgcaaactatatagatgaaagggagaaaagcatttcagagttatctgatcagtacaagcaagaaaaacttattttactacaaagatgtgaagaaaccggaaatgcatatgaggatcttagtcaaaaatacaaagcagcacaggaaaagaattctaaattagaatgcttgctaaatgaatgcactagtctttgtgaaaataggaaaaatgagttggaacagctaaaggaagcatttgcaaaggaacaccaagaattcttaacaaaattagcatttgctgaagaaagaaatcagaatctgatgctagagttggagacagtgcagcaagctctgagatctgagatgacagataaccaaaacaattctaagagcgaggctggtggtttaaagcaagaaatcatgactttaaaggaagaacaaaacaaaatgcaaaaggaagttaatgacttattacaagagaatgaacagctgatgaaggtaatgaagactaaacatgaatgtcaaaatctagaatcagaaccaattaggaactctgtgaaagaaagagagagtgagagaaatcaatgtaattttaaacctcagatggatcttgaagttaaagaaatttctctagatagttataatgcgcagttggtgcaattagaagctatgctaagaaataaggaattaaaacttcaggaaagtgagaaggagaaggagtgcctgcagcatgaattacagacaattagaggagatcttgaaaccagcaatttgcaagacatgcagtcacaagaaattagtggccttaaagactgtgaaatagatgcggaagaaaagtatatttcagggcctcatgagttgtcaacaagtcaaaacgacaatgcacaccttcagtgctctctgcaaacaacaatgaacaagctgaatgagctagagaaaatatgtgaaatactgcaggctgaaaagtatgaactcgtaactgagctgaatgattcaaggtcagaatgtatcacagcaactaggaaaatggcagaagaggtagggaaactactaaatgaagttaaaatattaaatgatgacagtggtcttctccatggtgagttagtggaagacataccaggaggtgaatttggtgaacaaccaaatgaacagcaccctgtgtctttggctccattggacgagagtaattcctacgagcacttgacattgtcagacaaagaagttcaaatgcactttgccgaattgcaagagaaattcttatctttacaaagtgaacacaaaattttacatgatcagcactgtcagatgagctctaaaatgtcagagctgcagacctatgttgactcattaaaggccgaaaatttggtcttgtcaacgaatctgagaaactttcaaggtgacttggtgaaggagatgcagctgggcttggaggaggggctcgttccatccctgtcatcctcttgtgtgcctgacagctctagtcttagcagtttgggagactcctccttttacagagctcttttagaacagacaggagatatgtctcttttgagtaatttagaaggggctgtttcagcaaaccagtgcagtgtagatgaagtattttgcagcagtctgcaggaggagaatctgaccaggaaagaaaccccttcggccccagcgaagggtgttgaagagcttgagtccctctgtgaggtgtaccggcagtccctcgagaagctagaagagaaaatggaaagtcaagggattatgaaaaataaggaaattcaagagctcgagcagttattaagttctgaaaggcaagagcttgactgccttaggaagcagtatttgtcagaaaatgaacagtggcaacagaagctgacaagcgtgactctggagatggagtccaagttggcggcagaaaagaaacagacggaacaactgtcacttgagctggaagtagcacgactccagctacaaggtctggacttaagttctcggtctttgcttggcatcgacacagaagatgctattcaaggccgaaatgagagctgtgacatatcaaaagaacatacttcagaaactacagaaagaacaccaaagcatgatgttcatcagatttgtgataaagatgctcagcaggacctcaatctagacattgagaaaataactgagactggtgcagtgaaacccacaggagagtgctctggggaacagtccccagataccaattatgagcctccaggggaagataaaacccagggctcttcagaatgcatttctgaattgtcattttctggtcctaatgctttggtacctatggatttcctggggaatcaggaagatatccataatcttcaactgcgggtaaaagagacatcaaatgagaatttgagattacttcatgtgatagaggaccgtgacagaaaagttgaaagtttgctaaatgaaatgaaagaattagactcaaaactccatttacaggaggtacaactaatgaccaaaattgaagcatgcatagaattggaaaaaatagttggggaacttaagaaagaaaactcagatttaagtgaaaaattggaatatttttcttgtgatcaccaggagttactccagagagtagaaacttctgaaggcctcaattctgatttagaaatgcatgcagataaatcatcacgtgaagatattggagataatgtggccaaggtgaatgacagctggaaggagagatttcttgatgtggaaaatgagctgagtaggatcagatcggagaaagctagcattgagcatgaagccctctacctggaggctgacttagaggtagttcaaacagagaagctatgtttagaaaaagacaatgaaaataagcagaaggttattgtctgccttgaagaagaactctcagtggtcacaagtgagagaaaccagcttcgtggagaattagatactatgtcaaaaaaaaccacggcactggatcagttgtctgaaaaaatgaaggagaaaacacaagagcttgagtctcatcaaagtgagtgtctccattgcattcaggtggcagaggcagaggtgaaggaaaagacggaactccttcagactttgtcctctgatgtgagtgagctgttaaaagacaaaactcatctccaggaaaagctgcagagtttggaaaaggactcacaggcactgtctttgacaaaatgtgagctggaaaaccaaattgcacaactgaataaagagaaagaattgcttgtcaaggaatctgaaagcctgcaggccagactgagtgaatcagattatgaaaagctgaatgtctccaaggccttggaggccgcactggtggagaaaggtgagttcgcattgaggctgagctcaacacaggaggaagtgcatcagctgagaagaggcatcgagaaactgagagttcgcattgaggccgatgaaaagaagcagctgcacatcgcagagaaactgaaagaacgcgagcgggagaatgattcacttaaggataaagttgagaaccttgaaagggaattgcagatgtcagaagaaaaccaggagctagtgattcttgatgccgagaattccaaagcagaagtagagactctaaaaacacaaatagaagagatggccagaagcctgaaagtttttgaattagaccttgtcacgttaaggtctgaaaaagaaaatctgacaaaacaaatacaagaaaaacaaggtcagttgtcagaactagacaagttactctcttcatttaaaagtctgttagaagaaaaggagcaagcagagatacagatcaaagaagaatctaaaactgcagtggagatgcttcagaatcagttaaaggagctaaatgaggcagtagcagccttgtgtggtgaccaagaaattatgaaggccacagaacagagtctagacccaccaatagaggaagagcatcagctgagaaatagcattgaaaagctgagagcccgcctagaagctgatgaaaagaagcagctctgtgtcttacaacaactgaaggaaagtgagcatcatgcagatttacttaagggtagagtggagaaccttgaaagagagctagagatagccaggacaaaccaagagcatgcagctcttgaggcagagaattccaaaggagaggtagagaccctaaaagcaaaaatagaagggatgacccaaagtctgagaggtctggaattagatgttgttactataaggtcagaaaaagaaaatctgacaaatgaattacaaaaagagcaagagcgaatatctgaattagaaataataaattcatcatttgaaaatattttgcaagaaaaagagcaagagaaagtacagatgaaagaaaaatcaagcactgccatggagatgcttcaaacacaattaaaagagctcaatgagagagtggcagccctgcataatgaccaagaagcctgtaaggccaaagagcagaatcttagtagtcaagtagagtgtcttgaacttgagaaggctcagttgctacaaggccttgatgaggccaaaaataattatattgttttgcaatcttcagtgaatggcctcattcaagaagtagaagatggcaagcagaaactggagaagaaggatgaagaaatcagtagactgaaaaatcaaattcaagaccaagagcagcttgtctctaaactgtcccaggtggaaggagagcaccaactttggaaggagcaaaacttagaactgagaaatctgacagtggaattggagcagaagatccaagtgctacaatccaaaaatgcctctttgcaggacacattagaagtgctgcagagttcttacaagaatctagagaatgagcttgaattgacaaaaatggacaaaatgtcctttgttgaaaaagtaaacaaaatgactgcaaaggaaactgagctgcagagggaaatgcatgagatggcacagaaaacagcagagctgcaagaagaactcagtggagagaaaaataggctagctggagagttgcagttactgttggaagaaataaagagcagcaaagatcaattgaaggagctcacactagaaaatagtgaattgaagaagagcctagattgcatgcacaaagaccaggtggaaaaggaagggaaagtgagagaggaaatagctgaatatcagctacggcttcatgaagctgaaaagaaacaccaggctttgcttttggacacaaacaaacagtatgaagtagaaatccagacataccgagagaaattgacttctaaagaagaatgtctcagttcacagaagctggagatagaccttttaaagtctagtaaagaagagctcaataattcattgaaagctactactcagattttggaagaattgaagaaaaccaagatggacaatctaaaatatgtaaatcagttgaagaaggaaaatgaacgtgcccaggggaaaatgaagttgttgatcaaatcctgtaaacagctggaagaggaaaaggagatactgcagaaagaactctctcaacttcaagctgcacaggagaagcagaaaacaggtactgttatggataccaaggtcgatgaattaacaactgagatcaaagaactgaaagaaactcttgaagaaaaaaccaaggaggcagatgaatacttggataagtactgttccttgcttataagccatgaaaagttagagaaagctaaagagatgttagagacacaagtggcccatctgtgttcacagcaatctaaacaagattcccgagggtctcctttgctaggtccagttgttccaggaccatctccaatcccttctgttactgaaaagaggttatcatctggccaaaataaagcttcaggcaagaggcaaagatccagtggaatatgggagaatggtagaggaccaacacctgctaccccagagagcttttctaaaaaaagcaagaaagcagtcatgagtggtattcaccctgcagaagacacggaaggtactgagtttgagccagagggacttccagaagttgtaaagaaagggtttgctgacatcccgacaggaaagactagcccatatatcctgcgaagaacaaccatggcaactcggaccagcccccgcctggctgcacagaagttagcgctatccccactgagtctcggcaaagaaaatcttgcagagtcctccaaaccaacagctggtggcagcagatcacaaaaggtcaaagttgctcagcggagcccagtagattcaggcaccatcctccgagaacccaccacgaaatccgtcccagtcaataatcttcctgagagaagtccgactgacagccccagagagggcctgagggtcaagcgaggccgacttgtccccagccccaaagctggactggagtccaacggcagtgagaactgtaaggtccagtgaaggcactttgtgtgtcagtacccctgggaggtgccagtcattgaatagataaggctgtgcctacaggacttctctttagtcagggcatgctttattagtgaggagaaaacaattccttagaagtcttaaatatattgtactctttagatctcccatgtgtaggtattgaaaaagtttggaagcactgatcacctgttagcattgccattcctctactgcaatgtaaatagtataaagctatgtatataaagctttttggtaatatgttacaattaaaatgacaagcactatatcacaatctctgtttgtatgtgggttttacactaaaaaaatgcaaaacacattttattcttctaattaacagctcctaggaaaatgtagacttttgctttatgatattctatctgtagtatgaggcatggaatagttttgtatcgggaatttctcagagctgagtaaaatgaaggaaaagcatgttatgtgtttttaaggaaaatgtgcacacatatacatgtaggagtgtttatctttctcttacaatctgttttagacatctttgcttatgaaacctgtacatatgtgtgtgtgggtatgtgtttatttccagtgagggctgcaggcttcctagaggtgtgctataccatgcgtctgtcgttgtgcttttttctgtttttagaccaattttttacagttctttggtaagcattgtcgtatctggtgatggattaacatatagcctttgttttctaataaaatagtcgccttcgttttctgtaaaaaaaaaaaaaaaaaaaaaa

SEQ ID NO: 88 - DNA, 3663 bp, Human
  REST
ggcggcggcggcggcgcggactgggtgcgcggcgcagcgtcctgtgttggaatgtgcggctgccgcgagctcgcggcgcagcagcggagcgagcgccgccgaggcccggggccccagaccctggcggcggctgcggcagccgagacggcagggcgaggcccggaggcctgagcaccctctgcagccccactcctgggccttcttggtccacgacggccccagcacccaactttaccaccctcccccacctctcccccgaaactccagcaacaaagaaaagtagtcggagaaggagcggcgactcagggtcgcccgcccctcctcaccgaggaaggccgaatacagttatggccacccaggtaatggggcagtcttctggaggaggagggctgtttaccagcagtggcaacattggaatggccctgcctaacgacatgtatgacttgcatgacctttccaaagctgaactggccgcacctcagcttattatgctggcaaatgtggccttaactggggaagtaaatggcagctgctgtgattacctggtcggtgaagaaagacagatggcagaactgatgccggttggggataacaacttttcagatagtgaagaaggagaaggacttgaagagtctgctgatataaaaggtgaacctcatggactggaaaacatggaactgagaagtttggaactcagcgtcgtagaacctcagcctgtatttgaggcatcaggtgctccagatatttacagttcaaataaagatcttccccctgaaacacctggagcggaggacaaaggcaagagctcgaagaccaaaccctttcgctgtaagccatgccaatatgaagcagaatctgaagaacagtttgtgcatcacatcagagttcacagtgctaagaaattttttgtggaagagagtgcagagaagcaggcaaaagccagggaatctggctcttccactgcagaagagggagatttctccaagggccccattcgctgtgaccgctgcggctacaatactaatcgatatgatcactatacagcacacctgaaacaccacaccagagctggggataatgagcgagtctacaagtgtatcatttgcacatacacaacagtgagcgagtatcactggaggaaacatttaagaaaccattttccaaggaaagtatacacatgtggaaaatgcaactatttttcagacagaaaaaacaattatgttcagcatgttagaactcatacaggagaacgcccatataaatgtgaactttgtccttactcaagttctcagaagactcatctaactagacatatgcgtactcattcaggtgagaagccatttaaatgtgatcagtgcagttatgtggcctctaatcaacatgaagtaacccgccatgcaagacaggttcacaatgggcctaaacctcttaattgcccacactgtgattacaaaacagcagatagaagcaacttcaaaaaacatgtagagctacatgtgaacccacggcagttcaattgccctgtatgtgactatgcagcttccaagaagtgtaatctacagtatcacttcaaatctaagcatcctacttgtcctaataaaacaatggatgtctcaaaagtgaaactaaagaaaaccaaaaaacgagaggctgacttgcctgataatattaccaatgaaaaaacagaaatagaacaaacaaaaataaaaggggatgtggctggaaagaaaaatgaaaagtccgtcaaagcagagaaaagagatgtctcaaaagagaaaaagccttctaataatgtgtcagtgatccaggtgactaccagaactcgaaaatcagtaacagaggtgaaagagatggatgtgcatacaggaagcaattcagaaaaattcagtaaaactaagaaaagcaaaaggaagctggaagttgacagccattctttacatggtcctgtgaatgatgaggaatcttcaacaaaaaagaaaaagaaggtagaaagcaaatccaaaaataatagtcaggaagtgccaaagggtgacagcaaagtggaggagaataaaaagcaaaatacttgcatgaaaaaaagtacaaagaagaaaactctgaaaaataaatcaagtaagaaaagcagtaagcctcctcagaaggaacctgttgagaagggatctgctcagatggaccctcctcagatggggcctgctcccacagaggcggttcagaaggggcccgttcaggtggagctgccacctcccatggagcatgctcagatggagggtgcccagatacggcctgctcctgacgagcctgttcagatggaggtggttcaggaggggcctgctcagaaggagctgctgcctcccgtggagcctgctcagatggtgggtgcccaaattgtacttgctcacatggagctgcctcctcccatggagactgctcagacggaggttgcccaaatggggcctgctcccatggaacctgctcagatggaggttgcccaggtagaatctgctcccatgcaggtggtccagaaggagcctgttcagatggagctgtctcctcccatggaggtggtccagaaggagcctgttcagatagagctgtctcctcccatggaggtggtccagaaggaacctgttaagatagagctgtctcctcccatagaggtggtccagaaggagcctgttcagatggagttgtctcctcccatgggggtggttcagaaggagcctgctcagagggagccacctcctcccagagagcctccccttcacatggagccaatttccaaaaagcctcctctccgaaaagataaaaaggaaaagtctaacatgcagagtgaaagggcacggaaggagcaagtccttattgaagttggcttagtgcctgttaaagatagctggcttctaaaggaaagtgtaagcacagaggatctctcaccaccatcaccaccactgccaaaggaaaatttaagagaagaggcatcaggagaccaaaaattactcaacacaggtgaaggaaataaagaagcccctcttcagaaagtaggagcagaagaggcagatgagagcctacctggtcttgctgctaatatcaacgaatctacccatatttcatcctctggacaaaacttgaatacgccagagggtgaaactttaaatggtaaacatcagactgacagtatagtttgtgaaatgaaaatggacactgatcagaacacaagagagaatctcactggtataaattcaacagttgaagaaccagtttcaccaatgcttcccccttcagcagtagaagaacgtgaagcagtgtccaaaactgcactggcatcacctcctgctacaatggcagcaaatgagtctcaggaaattgatgaagatgaaggcatccacagccatgaaggaagtgacctaagtgacaacatgtcagagggtagtgatgattctggattgcatggggctcggccagttccacaagaatctagcagaaaaaatgcaaaggaagccttggcagtcaaagcggctaagggagattttgtttgtatcttctgtgatcgttctttcagaaagggaaaagattacagcaaacacctcaatcgccatttggttaatgtgtactatcttgaagaagcagctcaagggcaggagtaatgaaactttgaacaaggtttca

SEQ ID NO: 89 - DNA, 4603 bp, Human
  UBTF
ggtgaggtggctttgaccccgggttgcccggccagcacgaccgaggaggtggctggacagctggaggatgaacggagaagccgactgccccacagacctggaaatggccgcccccaaaggccaagaccgttggtcccaggaagacatgctgactttgctggaatgcatgaagaacaaccttccatccaatgacagctccaagttcaaaaccaccgaatcacacatggactgggaaaaagtagcatttaaagacttttctggagacatgtgcaagctcaaatgggtggagatttctaatgaggtgaggaagttccgtacattgacagaattgatcctcgatgctcaggaacatgttaaaaatccttacaaaggcaaaaaactcaagaaacacccagacttcccaaagaagcccctgaccccttatttccgcttcttcatggagaagcgggccaagtatgcgaaactccaccctgagatgagcaacctggacctaaccaagattctgtccaagaaatacaaggagcttccggagaagaagaagatgaaatatattcaggacttccagagagagaaacaggagttcgagcgaaacctggcccgattcagggaggatcaccccgacctaatccagaatgccaagaaatcggacatcccagagaagcccaaaaccccccagcagctgtggtacacccacgagaagaaggtgtatctcaaagtgcggccagatgccactacgaaggaggtgaaggactccctggggaagcagtggtctcagctctcggacaaaaagaggctgaaatggattcataaggccctggagcagcggaaggagtacgaggagatcatgagagactatatccagaagcacccagagctgaacatcagtgaggagggtatcaccaagtccaccctcaccaaggccgaacgccagctcaaggacaagtttgacgggcgacccaccaagccacctccgaacagctactcgctgtactgcgcagagctcatggccaacatgaaggacgtgcccagcacagagcgcatggtgctgtgcagccagcagtggaagctgctgtcccagaaggagaaggacgcctatcacaagaagtgtgatcagaaaaagaaagattacgaggtggagctgctccgtttcctcgagagcctgcctgaggaggagcagcagcgggtcttgggggaagagaagatgctgaacatcaacaagaagcaggccaccagccccgcctccaagaagccagcccaggaagggggcaagggcggctccgagaagcccaagcggcccgtgtcggccatgttcatcttctcggaggagaaacggcggcagctgcaggaggagcggcctgagctctccgagagcgagctgacccgcctgctggcccgaatgtggaacgacctgtctgagaagaagaaggccaagtacaaggcccgagaggcggcgctcaaggctcagtcggagaggaagcccggcggggagcgcgaggaacggggcaagctgcccgagtcccccaaaagagctgaggagatctggcaacagagcgttatcggcgactacctggcccgcttcaagaatgaccgggtgaaggccttgaaagccatggaaatgacctggaataacatggaaaagaaggagaaactgatgtggattaagaaggcagccgaagaccaaaagcgatatgagagagagctgagtgagatgcgggcacctccagctgctacaaattcttccaagaagatgaaattccagggagaacccaagaagcctcccatgaacggttaccagaagttctcccaggagctgctgtccaatggggagctgaaccacctgccgctgaaggagcgcatggtggagatcggcagtcgctggcagcgcatctcccagagccagaaggagcactacaaaaagctggccgaggagcagcaaaagcagtacaaggtgcacctggacctctgggttaagagcctgtctccccaggaccgtgcagcatataaagagtacatctccaataaacgtaagagcatgaccaagctgcgaggcccaaaccccaaatccagccggactactctgcagtccaagtcggagtccgaggaggatgatgaagaggatgaggatgacgaggacgaggatgaagaagaggaagatgatgagaatggggactcctctgaagatggcggcgactcctctgagtccagcagcgaggacgagagcgaggatggggatgagaatgaagaggatgacgaggacgaagacgacgacgaggatgacgatgaggatgaagataatgagtccgagggcagcagctccagctcctcctcctcaggggactcctcagactctgactccaactgaggctcagccccaccccagggcagccagggagagcccaggagctcccctccccaactgaccacctttgtttctcccccatgttctgtcccttgcccccctggcctcccccactttctttctttctttaaaaaaaaaaaaaaatacggtgggggtagggggctggaggagcccaggccaggactctgcagcctcagagacatcagcccttgggggtcctcctccagggacagcaactatcagactaagccagcaccggaccagcctggcccaccccacccacttctgcacttgcggttccggcatggacaatggaccggagagtgggggtggggggtcccaaagagtttgatgaggccctccacacctgcggcccaatccaaggtggggtggaagcttggggaagacccattccttcccagaggggcctgccacctggacccctgcattggaactggaggcagggaacatggggaggaggagggtcggtgccttcaagaaaacaggcactgccctggtggccctctcccctgccccctgcaggaaggagctgcctggacccgttcatgggggagggggcagaagtgttttttatatatgtgtatatatttttttttaagctctgagctgtcaacgagacgtttcctaccgatctcggctgccgtctctgttgtcatttctgggagagggagggtttaggggtagatttggaaccttttaaaaatggtcttgatgtatgtggaagagagtatgtgtatgtgtgttcctgtacatagcatgggtgcagctgtggatgtgtgcaaaagagtgtgagtgtgtgtgtgtgtgtgtaaaggggtctgtcctagagcccacatcagtttgttgtgaatctggaaaaagggtcggtgagggccgggagatgttgaccctggtgggagcaggctgaggctgccccgttctccacatcctctgttttgcccagtctctgattccattagggggagtgtgctgaagccattctcggatgcttcccagaccaggctccctctgccagagtcacatgcatccgagctgctggtctccattgtccagcaggaaggcggaaaggcaggcaagatggtgtgaagcttaaagcttgtatttgatggaaaaggtctcccctgttcatctgagaggccaagcctggccaccccaggctcagaacctgggcttcaagaaatgtgctgggagctcctaacttacacatccctccagccttccttgaatcctcccaccaccccctatttcctttaatttctcaggtctgctccctcctcccccaaccccacagctgggcaagaagtctgcaaaagctgcatctgcagctgtctctaactcttcccagccatctcccgtattttttggtaccttgattccttgactcttaataagccaagccaccttatctctgtagttcttatttttttgttgactaaatttggggggttcttttttatggtcatgtcactgacctattaaattggggcttggtgcttttccaccttccccctctgaatgaaagccaaggaatgggggaagagcgggaactctgccgcggaggtggagcaagaacggtgaagggccctggtcccagagaggctggtgggtccctctcccaaaggaaggcagacagtctctgctttgccttggaccttggtgctgggggtggggaggcctgggggggacactccccactcccattccccttcctttgtcctaatcctggaattaagtacaggggtttataggttctatttcttcccaagagccctgcaaagaaccccagtttcctatttggatgcccctacactgttgtgtttcagtggaatgtattttcatttaaaaacaactttgaatggggcactttttctttcctgttttaaaaattgaaaaattcttacagtacaaacaggactgtcagggtgggggtgttggtgctgtaagaggtcactcttgagtgcattttggcactgggatgggatggctggggtgggaagacccccatccccacccccaacttcttttctaatatttaaggagtgttttgtaggattcaacaaccaccacaacttgaatttgtatcatgggaggtgggagggagtggcttagaggtgtctgcctatgcttaaagccaactgtggaagttttgttttcccttttttgtataataaagtgaaaaacaaaggtttgaaaaaaaaaaaaaaaaaaaaaaaaaaaaaaaaa

SEQ ID NO: 90 - DNA, 4484 bp, Human
  SUHW4
acggctcggctgccagctccgcaatgggagccgccgccgtcgccgcagtgtagtttttcgtgctcctccttttcctcctcctctttctcctcctcctcagggctccagtcaggccgatccgctccgctcacggaaggaaaacagaaataacttgctggcttgtctggagtcacatgtacttaggtgacaatttacagaaagtcatctctgcagcttgatgggcgacaacccttttcaaccaaaaagtaattcaaaaatggcagaactgtttatggaatgtgaagaagaggagctggaaccatggcagaagaaagtaaaagaagttgaggatgacgatgatgatgagccaatctttgttggcgagatatcaagttcaaaaccagcaatttcaaatattttgaacagagttaaccccagctcatattcaaggggactaaagaatggtgcactcagtcgaggtattactgctgcattcaagcctacaagtcaacactacacgaatccaacatcaaatccagtgcctgcctcaccaataaattttcatcctgagtctagatcttcagatagttctgttattgttcagcctttttctaaacctggttatataacaaactcatcacgagttgtgtctaataagtcatcagagttactgtttgacttgacccaggatacaggattatcacattaccaagggggaccaacactttctatggcaggtatgagtgaaagttcatttttatcaaaacgtccttctacttctgaagtaaataatgttaatccaaagaagcctaaacccagcgaaagtgtttctggagcaaattcctcagctgtattaccttcagttaaatctccttcagtgacttcttcccaggctatgctagcaaaaggtacaaatacctcatcaaatcagtctaaaaatggaacaccttttccaagagcttgtccaaagtgcaacattcatttcaatcttttggatcctttgaaaaatcacatgaagtattgttgtccagacatgataaataactttttgggactggctaaaacagaattttcaagtacagtaaataaaaacacaactattgattcagagaaaggaaaattgatcatgttagttaatgacttttattatggaaaacatgaaggagatgtccaggaggaacagaagactcacacaacctttaaatgcttcagttgcttgaaaattctaaaaaataacattaggtttatgaaccacatgaaacaccatttggaacttgagaagcagagcagtgagagctgggaaaaccataccacctgccagcactgctaccgtcagtttcccacaccatttcagttgcagtgtcacatcgaaagtacacatacgccccatgaattttctactatttgtaaaatctgtgaattgtcatttgaaacagaacatgttcttttacaacatatgaaggacaatcataaacctggtgaaatgccatatgtctgccaggtttgtaattatagatcatcatcattttctgatgtagaaactcattttagaacatcccatgaaaacactaagaacttgctatgcccgttttgcctcaaagttattaaaattgcaacaccatatatgcatcattatatgaagcatcagaaaaaaggaatacatcgttgtacaaaatgcaggctgcagtttttgacatgcaaggagaaaatggatcataagactcaacaccatcgaacatttataaaacctaaacaactagaaggattgcctcctggaacaaaagttactattcgagcttcagttggacctctgcaatcaggagcttcacctacaccttccattagtgcaagtgcttctacccttcagctctcacctccaaggactaaaaatataactgctaaaaatcctgcaaaatctaatacaagtaaacctaatacagtcaaatccaacgcaagtaaacctaatacaagtaagcctaatggaagtaaatctaaatacaaaccaaaaatctctaatatgcaaaagaaacaaagcacattggctagtagcaataaaaaaagtaaagtcaatacagcattgaggaatttaaggtatcgtcggggcattcacaaatgcattgagtgttgttccgaaataaaagattttgcaaaccactttcctacgtacgtccactgtagtttttgcagatacaacactagctgtagcaaagcctatgtaaatcatatgatgagctttcatagtaaccgtccaagcaaaaggttttgtatttttaagaagcattcagaaaatctccggggcattactctagtgtgccttaattgtgatttcctaagtgatgtttctggcttagataatatggctacacacttaagtcaacataaaactcatacttgccaagttgtaatgcagaaagtttctgtttgtatcccaacttctgagcacctttctgaattaaaaaaagaagctcccgcaaaggaacaagaacctgtgtctaaggaaattgcaagacctaacatggctgaaagagaaacagaaacatcaaattctgaaagtaaacaagataaagctgcttcttcaaaagaaaaaaatggatgtaatgcaaattcatttgaaggctcatcaacaacaaaaagtgaagaaagcataacagtttcagataaggaaaatgaaacctgtcttgcagaccaggaaactggctcaaaaaacatcgtcagttgtgattcaaatattggtgcagataaagtggaaaagaaaaaacaaatacaacacgtttgtcaggaaatggagttgaagatgtgccaaagttcagaaaacataatcttatctgatcagattaaagatcacaactccagtgaagccagattttcttcaaagaatattaaggatttgcgattagcatcagataatgtaagcattgatcagtttttgagaaaaagacatgaacctgaatctgttagttctgatgttagcgagcaaggcagtattcatttggaacctctgactccatccgaggtacttgagtatgaagccacagagattcttcagaaaggtagtggtgatccttcagccaagactgatgaagtagtgtctgatcaaacagatgacattcctggaggaaataaccctagcacaacagaggcaacagtagacctggaagatgaaaaagaaagaagttgaaattagtcattttaagtttcagtgtaccaacgataagggcatttggaacagtgctatcaggtgagctcagtggtgctgttgtaggttcagaaatggaaatatgtaagggaggtcacacatacactttacctgtatgttcaacctatgttatcaaacaaatcaattcaccaataatagcatgattagtagggattcccaaaaagtttttaaaaacacgaacaggattttaatgataattaaatttgcagtggaaaggtctcatttaatggttttcaaggaaatgggatttggttgctgacatgaattgatgatattagtaatatttataaagcctttcaaacttccatcaatcctaagctaaaaatctttattacctgtatatccttttcagttaactgagaggaagggatttggaaaccatgtacttttggggagtaattgattaaaaacaatggctgattggcattgttaatgaaggctttatttgtgaggatgatgctggtaaatggagcatgcttagagtactaaattgatctaatgagaatttggatgaacataaacttaattttggatttaatataacattccagtcagacgcatgtaaacagaatatttgaatctttgtacctccatacaagtgttagcctgccaggctgtaagcttaccttaattaaactttcagtgaaagtggaattattaagatataaatttatatttgtgctttttgtcagtgtgtaagctgtgtagaaattctttgatgtattagttgtattaatgtaaagtagaaacccattgttgaaactcctgtagctattatgcttttaatattgttttaatgatcttccttagaaataggcccataaaaatggtctggaagccaaaccaaagtatggtataatgtagatattgtaaagcagtaaactgaaaacatgtcctggcatgtattcagccatgtttaagtgacttttctgtaattgtaaaataaaaacttcaaatgggacctaaaacagtgatgtaaaagaactggttttggaaatttagcctaatttatctataagatggctgctaaattgatttttcagttctttttatcatctagaatataatagatatagaaatgaataatatgaagaacagtagtttgctttgaaatactaataaacttttatttaaaatgcttcatttttacttcttaaaatgtgctttggattcttaaattttgtttcactgaatgttcaatgttttaaatggcgattaaaatactctgctgtatatagtagtttttgagtaaatatttgcaataaaaatctgcccccgaataaaaaaa

SEQ ID NO: 91 - DNA, 13003 bp, Human
  BRWD1
gcggcgcgcacggtatggcggcggcggcggcggcggcggcgcgcgcctgagaagaggggacgccagcccggtcaggcctcggcgcggcctacacgctccgctcgctcgctcgctcccgcctcccgccccgcgcccggccatggcggagccgtcgtccgcccgacgcccggtgcctctcatcgagtcggagctgtacttccttatcgcccggtacctatcggcgggcccgtgtcggagagcggcccaggtgctggtgcaggagctggagcagtaccagttgttgccgaagagattggactgggagggcaacgagcacaacaggagctacgaggagttggtcttgtccaataagcatgtggctcctgatcatcttttgcaaatctgccagcgcatcggtcctatgttggataaagaaattccacccagtatttcaagagtcacttctttacttggtgcaggaaggcagtctttgctacgtacagcaaaagactgcaggcacacagtttggaagggctctgcctttgctgctcttcatagaggaagacctcctgaaatgccagtgaattatggttccccaccaaatcttgtggagatacatcgaggaaaacaactcacagggtgttccacttttagtacagcatttccaggaactatgtatcagcatataaaaatgcacagaaggattctcggacatctatctgctgtttactgtgtagcatttgataggacaggacatagaatctttacaggttcagatgactgtttggtaaagatttggtcaacacataatggccgcttgttatctacattaagaggtcattctgcagaaatttcagatatggcagtaaactatgagaatacaatgattgctgcggggagctgtgataaaattattagagtgtggtgcttgagaacttgtgccccagttgctgtgctccaaggacacacaggatcaattacatctttacagtttagcccgatggccaaaggctctcaaagatacatggtttccactggtgctgatgggacagtttgcttttggcaatgggatttagaatccttaaaatttagcccacgtcccctgaagttcactgaaaagcctaggccaggcgttcaaatgctttgttcttcttttagtgttggtggtatgtttttagccacaggtagtactgatcatgtaatcagaatgtattttttgggttttgaagcacccgaaaaaatcgcagaacttgaaagccacactgataaagtagatagtatccaattttgtaacaatggtgatcggttcctaagtggtagcagagatggaacagcacggatttggagatttgagcagttagaatggaggagcattttattggatatggctaccagaatctcaggggacttatcttccgaagaggaaaggtttatgaaacctaaagtaacaatgatagcttggaatcaaaatgatagcattgttgtcacagctgtgaatgatcatgtcctcaaagtgtggaattcttacactggacaactgcttcataacttaatgggacatgctgatgaagtatttgttctggagacacatccctttgattccagaattatgttatctgcaggacatgatggcagcatatttatatgggatattacaaaaggtaccaagatgaaacattattttaatatgattgaaggacaaggacatggagctgtgtttgactgtaagttttcacaggatggacagcattttgcctgtacagattctcatgggcaccttctgatatttggttttggatgcagcaaaccatatgaaaagattcctgatcagatgttcttccatactgactatcgaccacttattagagattctaataattatgtcttagatgagcaaactcagcaggctcctcatcttatgcctccaccattcttggtagatgtagatggaaatcctcatccaaccaagtatcagagattagtaccaggccgagaaaattctgcagatgaacatttgattccacagctgggctatgtggcaacaagtgatggagaggtgattgaacaaattataagcctgcaaaccaatgataatgatgaacgcagcccagaatcgagtattcttgatggaatgataagacagttgcagcagcagcaagatcagagaatgggagcagatcaggatactattccaagaggactttcaaatggtgaagaaacaccccggagaggttttagaaggctgagcttagacattcagtcccctccaaatattggtctgcgtcgtagtggacaagttgaaggtgttcgtcagatgcatcaaaacgctccacgcagtcagattgctacagaacgtgacctgcaggcttggaaacgaagagtggttgtaccagaggtaccactaggcatatttaggaagctggaagacttccgattagagaaaggtgaagaggaaagaaatctttatataataggaagaaaaagaaagactcttcagctctcacataagtcggattcagtggttttggtatcacagtctagacaaaggacatgtaggcgtaaatatccaaattatggtagaagaaatcgtagctggcgtgagttatcttctggaaatgagtcttcaagctctgtaagacatgagacttcctgtgatcagagtgaaggttctggttcttcagaagaggatgaatggagaagtgacagaaaaagtgagagttacagcgaaagttcaagtgactcttcatctagatattccgattggacagctgatgcgggcatcaatttgcagcctcctttaagaacatcatgtcgtcgacgaattactcgattttgtagtagttcagaagatgaaatatctactgagaatttatctcctccaaaaagaagacgaaagagaaagaaagaaaataagcctaagaaggagaatttgcggaggatgactccagcagagcttgcaaatatggagcatttatatgaatttcaccctccagtttggattactgacaccacacttagaaaatctccttttgttcctcaaatgggtgatgaggtaatatattttcgacagggtcatgaagcttatattgaggctgtaagaagaaataatatttatgaactgaaccctaataaggagccatggagaaaaatggatcttagggatcaagaattggttaaaatagttggaatacgatatgaagttgggccccctacactctgttgcctaaaactagcatttatagatccagcaactggaaaacttatggacaaatctttctctattagatatcatgatatgccagatgttattgactttcttgtattgcgtcaattttatgatgaagcaagacagaggaattggcagtcttgtgacagattccgctctattattgatgatgcttggtggtttggaacagtgttaagtcaagagccatatcaaccacagtatcctgatagtcatttccagtgttatattgttaggtgggataatactgaaattgaaaaacttagcccatgggacatggaaccaattcctgataatgttgatccacctgaagaattaggagctagtatttctgtcacaacagatgagctagagaaattgctctataaaccacaagctggtgaatggggtcagaaatcaagagatgaagaatgtgatagaattatcagtggtatagatcaacttttgaatcttgatatagcagcagcttttgcaggccctgttgatttgtgtacatacccgaagtactgtactgtagtagcttatccaaccgatctttacacaattcgaatgagacttgttaatcgattttacaggaggctgtctgcgttagtttgggaagtcagatatatagaacataatgccagaacatttaacgaacctgagagtgtaattgcaagatcagctaaaaagataactgaccaacttttaaaatttatcaagaatcaacactgtacaaatatctcagaactttctaacacatctgaaaatgatgagcaaaatgctgaggatttggatgatagtgatcttcctaaaacatcttctggaaggaggagagtccatgatgggaaaaaaagcatcagagctacgaactatgttgaaagcaactggaagaaacagtgtaaggaactagtgaacttaatttttcagtgtgaagattctgaaccatttagacaacctgttgatttggttgaatatccagactacagagatattatagataccccaatggattttggaacagtaagggaaactctagatgcgggaaattatgacagccctttggagttttgcaaagacatccggctgatatttagcaatgcaaaagcgtatacaccaaacaaaagatcaaagatttatagtatgaccttgagattatctgccttatttgaagaaaaaatgaagaaaatctcttctgattttaaaattggtcaaaaattcaatgaaaaacttcgaagaagccagaggttcaagcaacggcaaaattgtaaaggtgacagtcagcctaacaaaagtatcagaaacctcaagccgaagaggttaaaatctcagacaaaaataattcctgagttggtaggttctcctacccagtctacctcaagtaggacagcttatcttggaacccacaagacaagtgctggtatctcttcaggtgttacttctggtgactcttcagattcagcagaatcatcagaaaggaggaaaagaaatagacctataacaaatggttctacattatctgaaagtgaagtggaagattctttagctacctctttgtcatcgtcagcttccagtagttctgaggaaagcaaagagagttccagagctcgtgaatcctcctcacgcagtgggctatccagaagcagcaatctcagggtaaccagaactagagctgctcaaagaaaaactggtcccgtttcattagcaaatggatgtggcagaaaagccactcgaaagagagtctatttaagtgattctgataacaattcattggagactggtgaaattctaaaagccagagctggaaataaccgaaaagtcttaaggaagtgtgctgctgtggctgccaataaaataaagctaatgagtgatgtagaagagaattctagctctgaaagtgtctgttctggtcggaagctgcctcaccgcaatgcttctgctgtagctagaaaaaagttattacataattctgaagatgaacagagcttaaagtcagaaattgaagaagaggagctaaaagatgaaaatcaactattaccagtgtccagttctcacactgcccagagcaatgttgatgaatctgaaaacagagactcagagtcagaaagtgatttgcgggtagcccggaaaaattggcatgctaatggttacaagtcccatactccagcaccttcaaagacaaaatttcttaaaatagagtcttctgaggaagactctaaaagtcatgattcagatcatgcatgtaacagaactgctggcccatcaacgtctgtgcagaaacttaaggcagagagcatctcagaggaagcagattctgaaccaggaagatctggtggtaggaaatacaatacatttcacaagaatgcgagtttctttaaaaaaaccaagattctgagtgactcagaagactctgaatctgaagagcaagatagagaagatgggaaatgtcataaaatggaaatgaacccaatttcaggaaatctgaactgtgaccctattgctatgtcccagtgttcctcagatcatggatgtgaaactgatttagattcagatgatgacaaaatagaaaaaccaaacaattttatgaaagattctgcatcacaagacaatggactaagcagaaaaatttccaggaaaagggtctgttccagtgactcagacagtagtttacaggtggttaagaaatcatcaaaagccagaacaggtctcctgaggattactcgaagatgtgcagctacggctgccaataagatcaagctcatgagtgatgtagaagatgtcagtttagaaaatgtgcacactagaagcaaaaatggaaggaaaaaacctctccatcttgcttgtactacagctaagaagaaattgagtgattgtgaaggaagtgtacattgtgaagtaccaagtgaacagtatgcctgtgaaggcaagccacctgatcctgactccgaaggtagtacaaaagtgcttagtcaggctctaaatggagactcagactctgaagatatgttgaattcagaacacaagcacaggcataccaatattcacaaaatagatgcaccttctaaaagaaaaagttcctctgttacatcttcaggagaagattcaaaaagtcatattccagggagtgagactgataggacattttcttcagagtcaaccttggcacaaaaagctactgcagagaataattttgaagtggaactgaattatgggctgcgcaggtggaatggcagaagactcaggacctatggaaaggctccttttagtaagacaaaagtgattcatgattcacaggaaacagcagagaaggaagtaaaaaggaagagatcgcatcctgaattggaaaatgtgaaaatctctgaaacaactgggaattcaaagtttagacctgatactagttccaaatcatcagatttgggatctgtaactgaatcagatattgactgtactgataatacaaaaaccaaaaggaggaaaacgaaaggaaaagcaaaagtagttagaaaaggtaaaacttttacagctaacatatctaaaactgtgagacgtcaaagacaaagcaaacgccctaggttaagtgtggatgataatgactgggaggatttggactatgcaaaatctaaaagagttcttcgacgttcaaaaataaaaacgagaaatcagggtagaaggactgtgagataccatgatggggatgatgacagaagtttagaaaatgtgttagatttcaatggttgcaccttatgaccttgagggaaagccagttcatttaagaggaaatggactggcatttatggtgaaagctggctgttaaaattatttttttgtcttacaattcagggaatatatttatatttttctatgaaaagttatgaatgtgactaaatcatgactgttatttttatttgcacttgctggtctttgtagcagcattcagcacaggtgccaaaatatgcttcattttgggggcagatctattttgacagtatttgactacatatagcaagagtttgaaatatgttaaacactagacatcctggttatcaaaaccaatgagcattactttcatggcagcaagtgtcatgcagttattttctgaatttgtcaaagaggcagtagtttctaacccctgttctatagtagttacaacaatttcacaacctatgtttacagattcttcataaatacatgcatactgacactataatcatgggaggtgtaaccatgattagtaggcgaggtacctaccacttttttttttttcttcccctggctacttgagtagaatgcattataccagatctggtcactttcattgaaatggtttctaattttcttcccaagtgctgttgggtttttttcttcttaaggaaaacgttgtcacttttatgttataaacttgaatttataaagtgctggtaaattatttttaatgatttgagtgcatgttttaaacctctaggaccagagcatagtcagagcattttcttttaaattgtgcactaacaaaatgctatataatctgtcttctgtccaagatctcctggtttccattgtaagggatttaaccaaaatcttgctcttccataatcttactctgtgaaatagaggaattcgtgtgccttagatttagaagtgtgttctttaatagagtgtacagggctaaaagagtatttaagttaatatgtaggtttcccccatctgtattccaattgtagaggtgagttttgttaagagtacaattgcaaatcttatctatataggaaaatagctaaatgtcattctccatctctttgttttagtttactgcttccatgtgcaatcctaagcattctttgctggggcaactaaatgtatctttattagtgacttctagtccaaatataagaaactgtcatgttttgtgggaaaataattttataatccatttaaagtgaaagtttatcacacaaatagtacacttattttctaaccaaatacttgataggttatgctactccagtgtagatggccattcctaacttgtttgtgcctgaagatggacttgattcaaatggtttacatatttagtgggtaagggatatgttacagtaccccacctgtaagttatttattagccctaattgtgtttgatttcagacaaaattaacccttttctcctgtgtatctttgaagtggcagataaggtgaagcatcagactggtatcaatattagacaatgttatttattagccctaattgtgtttggtttcagacaaaaccttttctcctgtgtatctttgaagtggcagacaaggcgaagcatcagactggtattaatgttagagaatgttctgaagtgttcctattttgtagttatctattccatttgacatagtagaaggtacattttctttctactctgatgcatggggaaggatgtttttggacattatcaactgagataggtgggaaacctcctctcatttgtggcttagagagctatcaccatttcagaactatgatgcttttcttctcagaacttgtgttaagtagatagtaaacagattgattcatgataattgtccttgactaagactgaaaagactaatgggatgccttttactttgctaattttaaaaactggtgatagatgtcaaatccattaatttatttaaactcttcttaaccttctcttttataatctgttctcaggttttaactccatgtttaccatcatttgcaaaaaggtaccaaaaaaatccataaataaatatggaatacattcataagtacatacattcttttggtataaaacaatattttgacagtttaggcttcattaatagaactattctgattatttggactgcattaattggtcattgactggccatccaattaccattttttctttcagtccaaaatagttagacccttgcatacagaagtggtattttggtttttaatcagatttggtttcatcagaagcagcaagaatggacctgatgtctttaaaagcatagccgacaatggtagcttctcaagttatgaaataaaactgagagataatggagaaaataatttttatgggtttttttggttatggtgctattcctaaggttaactttgaatatgtgacacacacactcctaagtacctttaaggaaaattaataaatcattaatagttaaaatgtttacattgagcactagaacatgtttggccttttttttctacgttatgcaaaatgcccagggatttaatgcacaggtgtactttaatgtttagggtcagtttgtagtattcttgagaaaaagataaagggttataatttgaatgtgaactgatccagaaataagtgctgtacctttccactgcacttgaagttcaacttaatggtgtatgtgaaaaacaaaaactactttggttgtgtatgtccaaagtcctatggttttattcatttatggttttacaggctttgaagtactcagatttgatttttgctttcttggaaagactcactttaccaagcatataaaggaaaaatgatttcaaacattgacaagatagatgagtgttaacaaagctttcttttttcgtgtcctccttatttaaaaaggtatacttacaatgtgaagtaacttatgaataaaaggaaaagtttatcccatattcaaataattcctaaggtcagcctccctttttgtaagtggcaaatatctgattaaatcatttctcagtttattaatccttggaaacaatgatatagcagttactcacagcttgtaaattacaacagaaaggttcctttcaaatagtagagctgcacctaaagaggaaattgggtttataagaaaatggaggcaaagaacttaagttttaagaaaaagcacttcaaaacagaagggcaaatggaaaaggggaatataaaacaaaccaataaaaataccatctgagggtgttactgtccaaaagtaaagaataagatgcatcactaagccctttgcactcgttatgacctcgtaagtaaaaattatcacttagaataaggggtgcacactacattccctctgtcttctagacttttttttttgtagaagaatcagaaaacaatttactaacctccctgtttgatattaaaaataggaagaattttaatattttctgttagtacaagttgaacttgattgtgccaactgaaaccccagaggtttgtatatcagtagaatgcaagaacattgttaaaggtgcttacgatcttttttgttttcctttccactccattgtatcaattttttgagtaacttttaaatggctagaaaatggtctttttgctttgcccttttaaagctgaaataaccagctccattcttttcatgaatagtaagttgatatatttatttatcaggtatcttgcagttgtcaccaaatactgtagttttcttatgttgtatggaaattatagttcaattattttaatgtgatagagtgcaacaagtcattgtagaacttttcacctgttaatgttgaagttatacctctgaatttctgctgtggatatcaaggaaataataaagcagaaaccccaagaaatttgcaacttaacagtttgagactgtctcttatcctagtatttgggaagagaaggaataaatttgtcaaaactaggtgagaaaatagagcattgtgggaaaaactgagtccaactagattagcaaatgttaattcctagctcaaactgtgaatagtaaggattgaaaagtaaagtatgtaatgctaagggctgtgttgtcttttcttacgattttaagttttaaaggctgttaaattacagagatgttgcccaaggatacatggggattctcaaaagtaagagatttttacctttttcataatctgccaagctggttcctaatatattgttaaattggtagaaaaatatctttaaattggtgtctgctcaagaattgcttttctagatttgatggagggagggggagagtcacatcatttggattctaccaatctgcaggctctatctttggcaacatgtaaataattagactatacatctgtttctcaagtatggcaagaccaatagtttgaatttaattatcaatgctatggtatactttctggtcatattttagttatgtcagttttaaggtaagttttttcatttattaaagcccttaaatgagattttagactgccaaagagaagaggcagtccaattgacctaactgaaatgagatgaccagtatatagagcctagatggactgtagcagctctacccctttgttttacaaggtaaatcattttaaaaattaccttttttgatcagtgggtaaaagttaaagggatctttaatttttgatatattcaagttaattttctaaatgtgaatcagtccttggactgcaactatatattcacctacaaaatcccaatcaaaaaattacatgagcctgtcaagcagatctttagttttccacttcacataagatcgttaatgttctaaattaatctattcatttagatgatttttgtcagttcttaaatgggatataataaatttagcattttcatcttaacaagcaaaagagttaaaaaacaaaacaaaacactactccaagccaaatacattctagctggttaattccagacttgtcccaagtggttccccaacctcttttccactggtaatttcttttcatgcaggcagaatataggggtgcgagcgctgtgagttttacatatgagcttggataggggaactgaagcgagtcaggagccctgctggaaaaggggtttgccattggattgtctgtggcctggtttctttccagtagtacagtaatagggtagattgaaaacaagtatttacttctgattctgcctgcatttagtgtgaaatgctcttaaggtattgcttctaaaaagcaaattaagcagttaagtataaagtccctgcacgaggatttcaaaataaggcttttatgagatttttattaaaaattgcaatagccatcacaaatctgagtttttctaggggtgagagaaaactgtattgtgatgagctagattagttgtagttccagaataagaacaaaaattcagagttgtgtggtgcccatcattgagtaaatgaaccctaaaaatgaataagctaatgaactagttcatggaattatttctgatggtcttttgacctgatgctgccatactgcagtgttaccagctccccctagaaaacggaactgtttaaaaacacagcaagttacagaaaccattttattctacagccattggggtacttcagtttatgggatgtttttggaaacttctgctttgggagggatgaagatcattgataaatgttatttgctttctgagttttggggtcatttcattgcttatcaatgaagggcagacagaggagagaatatctcaagtcttttctgataaaaggcttgcttgagggagcttataacttgcacctagagggtttacccactttgtggatttgatttatccaccaaccacagcaaccaataatgtcaagattctaggagtttatgaaagaggctagtatgttttcattttgagtcagacattcttttctcattctcaaatctgttttaaatgctccaattttaaaaatgccaatgaaaattttataatgcttctgtagtaaccatatgcagtttactttgaatttaggaaaacagttttgtatgatgaaatattgtgcagaatctgtaaataaggtagcttaaaaattaaaaaaaagtctaattaaaaaaaaaaaaaaaaaa

SEQ ID NO: 92 - DNA, 2614 bp, Human
  SDCCAG8
agcccccaagagctctgtgcgggattctaggctcccctgtgacagccgcggcaggaagcaggcgggcgctccccggccacaggcctgttgttctcggaagggagaaagctggacatttccccacgtaactcccagctctgggcctagagtgcgtgcatggcgaagtccccggagaactctaccctggaggagattctggggcagtatcaacggagtctccgggaacatgccagcagaagcattcaccaactgacatgtgccctgaaagaaggcgatgtcactattggagaagatgcaccaaatctttcttttagcaccagtgtgggaaatgaggacgccaggacagcctggcccgaattacaacagagccatgctgttaatcagctcaaagatttgttgcgccaacaagcagataaggaaagtgaagtatctccgtcaagaagaagaaaaatgtcccccttgaggtcattagaacatgaggaaaccaatatgcctactatgcacgaccttgttcatactattaatgaccagtctcaatatattcatcatttagaggcagaagttaagttctgcaaggaggaactctctggaatgaaaaataaaatacaagtagttgtgcttgaaaacgaagggctccagcaacagctaaaatctcaaagacaagaggagacactgagggaacaaacacttctggatgcatccggaaacatgcacaattcttggattacaacaggtgaagattctggggtgggcgaaacctccaaaagaccattttcccatgacaatgcagattttggcaaagctgcatctgctggtgagcagctagaactggagaagctaaaacttacttatgaggaaaagtgtgaaattgaggaatcccaattgaagtttttgaggaacgacttagctgaatatcagagaacttgtgaagatcttaaagagcaactaaagcataaagaatttcttctggctgctaatacttgtaaccgtgttggtggtctttgtttgaaatgtgctcagcatgaagctgttctttcccaaacccatactaatgttcatatgcagaccatcgaaagactggttaaagaaagagatgacttgatgtctgcactagtttccgtaaggagcagcttggcagatacgcagcaaagagaagcaagtgcttatgaacaggtgaaacaagttttgcaaatatctgaggaagccaattttgaaaaaaccaaggctttaatccagtgtgaccagttgaggaaggagctggagaggcaggcggagcgacttgaaaaagaacttgcatctcagcaagagaaaagggccattgagaaagacatgatgaaaaaggaaataacgaaagaaagggagtacatgggatcaaagatgttgatcttgtctcagaatattgcccaactggaggcccaggtggaaaaggttacaaaggaaaagatttcagctattaatcaactggaggaaattcaaagccagctggcttctcgggaaatggatgtcacaaaggtgtgtggagaaatgcgctatcagctgaataaaaccaacatggagaaggatgaggcagaaaaggagcacagagagttcagagcaaaaactaacagggatcttgaaattaaagatcaggaaatagagaaattgagaatagaactggatgaaagcaaacaacacttggaacaggagcagcagaaggcagccctggccagagaggagtgcctgagactaacagaactgctgggcgaatctgagcaccaactgcacctcaccagacaggaaaaagatagcattcagcagagctttagcaaggaagcaaaggcccaagcccttcaggcccagcaaagagagcaggagctgacacagaagatacagcaaatggaggcccagcatgacaaaactgaaaatgaacagtatttgttgctgacctcccagaatacatttttgacaaagttaaaggaagaatgctgtacattagccaagaaactggaacaaatctctcaaaaaaccagatctgaaatagctcaactcagtcaagaaaaaaggtatacatatgataaattgggaaagttacagagaagaaatgaagaattggaggaacagtgtgtccagcatgggagagtacatgagacgatgaagcaaaggctaaggcagctggataagcacagccaggccacagcccagcagctggtgcagctcctcagcaagcagaaccagcttctcctggagaggcagagcctgtcggaagaggtggaccggctgcggacccagttacccagcatgccacaatctgattgctgacctggatggaacagagtgaaataaatgatttacaaagagatatttacattcatctggtttagacttaatatgccacaacgcaccacgaccttcccagggtgacaccgcctcagcctgcagtggggctggtcctcatcaacgcgggcgctgtccccgcacgcagtcgggctggagctggagtctgactctagctgagcagagctcctggtgtatgttttcagaaatggcttgaagttatgtgtttaaatctgctcattcgtatgctaggttatacatatgattttcaataaatgaactttttaaagaaaaaaaaaaa

SEQ ID NO: 93 - DNA, 4420 bp, Human
  SLMAP
tttaaaggaggtgatggggcttgcgctggcttgtcttcccacccaagtgaagagttgatgttcactggttatgcttagacaatgtgcagtttgtgttaatttaaaattttgggtgggataggggcataggcttgtgaagggcagtccggatccggaggaactcgtctttgtccctggtaggagagacacccccagtctatcctcgatgccgtcagccttggccatcttcacttgccgcccgaactcgcacccgtttcaggagcgtcatgtctacctggacgagcccatcaaaatcggccgctcagtggcccgctgtcgaccagcgcagaataatgccacttttgattgcaaagtgctatcaaggaaccacgctctcgtctggtttgatcacaagacgggcaagttttatcttcaagacactaaaagtagtaatggtacttttataaatagccagagattgagtcgaggctctgaagaaagtccaccatgtgaaattctttccggtgacattatccagtttggagtagacgtgacagagaatacacggaaagttacccatgggtgtattgtttccacaataaaactttttctaccagatggtatggaagcccggctccgctcagatgtcatccatgcaccattaccaagtcctgttgacaaagttgctgctaacactccaagtatgtactctcaggaactattccagctttctcagtatctacaggaggccttacatcgggaacaaatgttggaacagaagttagccacgcttcagcggctactagccatcacccaagaggcttcagataccagttggcaggctttaatagatgaagatagactcttatcacggttagaagttatgggaaaccaattacaggcatgctccaaaaatcaaacagaagatagtttacgaaaggaacttatagcattacaagaggataaacataactatgagacaacagccaaagagtccctgaggcgggttcttcaggagaaaattgaagtggttagaaaactttcagaagttgagcgaagtctgagtaatactgaagatgaatgtacccatctgaaagaaatgaatgaaaggactcaggaagaattaagagaattagccaacaaatataatggagcagttaatgagattaaagatttatctgataaattaaaggtagcagagggaaaacaagaggaaatccaacagaagggacaggctgagaaaaaagaattacaacataaaatagatgaaatggaagaaaaagaacaggagctccaggcaaaaatagaagctttgcaagctgataatgatttcaccaatgaaaggctaacagctttacaagagcacttgctttcaaagagtggcggggactgcacttttattcatcaattcatagaatgccagaagaagctgatcgtcgaagggcatctaaccaaagcggtagaagaaacaaagctttcaaaagaaaatcagacaagagcaaaagaatctgatttttcagatactctgagtccaagcaaggaaaaaagcagtgacgacactacagacgcccaaatggatgagcaagacctaaatgagcctcttgccaaagtgtcccttttaaaagatgacttgcagggtgcacagtcagaaattgaggcaaagcaagaaatacagcatcttcgaaaggaattgatcgaagcccaggagctagctagaacaagtaaacaaaaatgctttgaacttcaagctcttttggaagaagaaagaaaagcctatcgaaatcaagttgaggaatccactaaacaaatacaggttcttcaagcccaattgcagaggttacacatcgatactgagaatctccgggaggagaaggacagtgaaatcacaagtactagagatgaattgcttagtgcccgagatgaaattttgctccttcatcaagcagcagcaaaggttgcctctgagcgggacactgacattgcttctttacaagaagagcttaagaaggtgagagctgagcttgagcggtggcggaaagcagcgtctgaatatgagaaagaaatcacaagtctgcaaaacagttttcagcttagatgtcaacagtgtgaggaccagcagagagaagaagcaacaaggttgcaaggtgaactagagaagttgagaaaggaatggaatgcattggaaaccgaatgccattctctaaaaagggaaaatgttttgctatcatcagaactgcaacggcaagaaaaagaattgcacaattctcagaagcagagtttagagcttaccagtgatctcagcatccttcaaatgtctaggaaagaacttgagaatcaagtgggatccttgaaagaacagcatcttcgggattcagctgatttaaaaactcttctcagtaaggcagaaaaccaagcaaaggatgtgcagaaagagtatgaaaagacacagactgtactctcagaactgaagttgaagtttgaaatgactgagcaggaaaagcagtcaatcacagatgagctcaaacagtgtaaaaacaacctgaagctgctccgagagaaaggaaataataaaccctggccctggatgcccatgttggctgccctggttgcagtaacagccatcgtgctgtacgtgccaggtctggccagagcttctccatgagagcgttccttgagtccgtacaccgtcctccctctagaagctggcatcacactcatgctggggacaaacagaaccattttcttcctctttacctcttaaaacagcagaagtacaagaatacagctgtagggtcattgctttaaattatataaaatgtatctgtctataaagaagatataaaattgtgactttattctactgtaagcaataatttgcttgcaatttttcatgtaatttttaaattagtatgttaagattctgaatattatggtggcctaaagtaggcttcttggtacaccagattatttataacattaaatttatgagtattttactctgaattctgatcaccagataattcatttttctgatttgataactacccaaaccaaacaaccaatacatacatgggaagagaggccctgtgtgctcagtgcctatcagtttgaaatatatacacatatatatattttttacatatttacgccatttttacttgttatgaaaccactgagctattgggaacaagacttagagacaactatttgcgtggatttttttttttttaaggaaaaatacgtttggaaaataaactgttatggtgataatttggggaatatgtgcacgcttgttcagccttaatgtgacttgaagatgtggaggacatcaactttgaaaaactttccatgagagtgtattttcttgagcaaactgaagtatttctgggagcaaaaacatagtaattacacaatttcagtgcagtcaaccaaaatgttgagtcaattggaatgtaatttattaaaccatgtatttaaagagatatttttctttaaaagccaagttactttctcatatacagcattttaggaagcatgattttttttttctatcatctattcctccaagcatgtttaattgaagaaagtattaatatctctttagataagcttgtattgacctaatttggtttatgatgtgtcagagctaattcatgttcagggtgagcgttgtacctaccaacaaatttcctggttgggtatgcaaatggttattttctttttattgttgttaattgggactttctgttaatgaaaagcactattcccaagattaatagtgttctatgcacaatgaagcacctaaaaacactgcttgatattataaatttaaaacacaagtgaaagtttagccatggttttgtgcggcatcatagttatgtcaataaagtttatttaggtcatagaatatcctaaagtatcacatagttaaatttttcagtcagtgaagaccgggagggaatgtcagtgaattggcttgaatgttctgtggcaatccacaggtctagccaaatattgaaataggagtttagggtataatttgccttgtgatgtttggcagtcactgtttatactttaaaggttatattttaagctatttgagattgcttttgggaagatcactagatttatggaggaattagtcacaaatgacttgtagaaaatactgtcatatagttcatttcatcattttctgttgcaggaagccactccaccacagaatgctaatatgccagtggtacccagtacctcttgtatataggttattgcaaatattgttctgaaatgcttaacttcagaattacattttttaaagtaaataattgttttaaatctattttgtaaagatataaagtacaatagaatttctggagtacagattaaactatttgcactaacacacgtgacgtgcatgatttaataaaataactttactctccct

SEQ ID NO: 94 - DNA, 2154 bp, Human
  FAF1
caggggcggaggcggcggccagggaggaagcggaggaggcggaggcggccgcggcgttcgcccgcccgctcgctcgctcggtttccccgcccccgccgggcttaacgccgctgaaggtatccgggtgcgcgctgtcgcaacctgccctcatcctggcccgcgactgtaagaccggacccacatccagaccaatcttcctgtccgggctgctgcgacgcgggctccgcaggttgcaggcgggcggccggggcgcctgaaggttaccgagtgcatgagcgcctagcgcttcccgcgctgccccgcccgctggcccgccgacccgcccgccggctcgcccgccagcccctcggcgcccggcggcggcggcggcggtggcggcgacggtcgcaggaggtgccgtctgcctcccaggtgcgcgcttcgctcccggagccgcggaactcggcggccgccatggcgtccaacatggaccgggagatgatcctggcggattttcaggcatgtactggcattgaaaacattgacgaagctattacattgcttgaacaaaataattgggacttagtggcagctatcaatggtgtaataccacaggaaaatggcattctacaaagtgaatatggaggtgagaccataccaggacctgcatttaatccagcaagtcatccagcttcagctcctacttcctcttcttcttcagcgtttcgacctgtaatgccatccaggcagattgtagaaaggcaacctcggatgctggacttcagggttgaatacagagacagaaatgttgatgtggtacttgaagacacctgtactgttggagagattaaacagattctagaaaatgaacttcagatacctgtgtccaaaatgctgttaaaaggctggaagacgggagatgtggaagacagtacggtcctaaaatctctacacttgccaaaaaacaacagtctttatgtccttacaccagatttgccaccaccttcatcatctagtcatgctggtgccctgcaggagttttcttcaagatatggtgattgccatcctgtattttttattggctcattagaagctgcttttcaagaggccttctatgtgaaagcccgagatagaaagcttcttgctatctacctccaccatgatgaaagtgtgttaaccaacgtgttctgctcacaaatgctttgtgctgaatccattgtttcttatctgagtcaaaattttataacctgggcttgggatctgacaaaggactccaacagagcaagatttctcactatgtgcaatagacactttggcagtgttgtggcacaaaccattcggactcaaaaaacggatcagtttccgcttttcctgattattatgggaaagcgatcatctaatgaagtgttgaatgtgatacaagggaacacaacagtagatgagttaatgatgagactcatggctgcaatggagatcttcacagcccaacaacaggaagatataaaggacgaggatgaacgtgaagccagagaaaatgtgaagagagagcaagatgaggcctatcgcctttcacttgaggctgacagagcaaagagggaagctcacgagagagagatggcagaacagtttcgtttggagcagattcgcaaagaacaagaagaggaacgtgaggccatccggctgtccttagagcaagccctgcctcctgagccaaaggaagaaaatgctgagcctgtgagcaaactgcggatccggacccccagtggcgagttcttggagcggcgtttcctggccagcaacaagctccagattgtctttgattttgtagcttccaaaggatttccatgggatgagtacaagttactgagcacctttcctaggagagacgtaactcaactggacccaaataaatcattattggaggtaaagttgttccctcaagaaacccttttccttgaagcaaaagagtaaacacggcccagcggtggaaccagccattccttgacaagccagcagcctgcgtcaggagaagggctcctcgccaacccacccacacgctcgtctcactcaattcaatgtcacacttctgcctcttgcaaaattgctggaaaaagtaataataaatatagctacttaagatttcccatcaaaaaaaaaaaaaaaaaaaaaaaaaaa

SEQ ID NO: 95 - DNA, 910 bp, Human
  ETNK1
ccagcgtcaggccagccccggcatgctctgcggccgcccgcggtccagctccgacaacaggaattttctccgagagcgggccgggctcagttcagctgctgtccagacccggatcggcaacagtgccgcctccagacgttctcctgccgctcgcccgcccgtcccagcgcccccagccctcccgcgagggcgccccgggacggaaggatccaccagtctgtcggcgcccgccgttctcgtggtcgccgtcgccgtcgtcgtggtggtagtctccgccgtcgcctgggccatggccaattacatccacgtccctcccggctccccggaggtgcccaagctgaacgtcaccgttcaggatcaggaggagcatcgctgccgggagggggccctgagcctcctgcaacacctgcggcctcactgggacccccaggaggtgaccctgcagctcttcacagatggaatcacaaataaacttattggctgttacgtgggaaacaccatggaggatgtagtcctggtgagaatttatggcaataagactgagttattagtcgatcgagatgaggaagtaaagagttttcgagtgttgcaggctcatgggtgtgcaccacaactctactgtaccttcaataatggactatgctatgaatttatacaaggagaagcactggatccaaagcatgtctgcaacccagccattttcagtttatcatcgttgactctttgcaaaggaaaaactacaagatgttttggattaaccggctgcagagggtcaaggcttctgcttagttttttctagttagtgtttgagttgaagtgttatacatttcttactgccgattgcttattacttaattgttcatgttttcagagttcttgcctattaaaattttattaatttggttaacaa

SEQ ID NO: 96 - DNA, 2396 bp, Human
  ICA1
actctgggcggcggatccgagcgggggataccccaggagatgggggtcgaggagagaccccggggagtagagagagagaaactcactccccgagtccccgaccctccccaagcaaggttataatataacttatcctctcatgcttttttcctgccccttctccccaaatcatcaacaatagaagaagaagaaaacatgtcaggacacaaatgcagttatccctgggacttacaggatcgatatgctcaagataagtcagttgtaaataagatgcaacagaaatattgggagacgaagcaggcctttattaaagccacagggaagaaggaagatgaacatgttgttgcctctgacgcggacctggatgccaagctagagctgtttcattcaattcagagaacctgtctggacttatcgaaagcaattgtactctatcaaaagaggatatgtttcttgtctcaagaagaaaacgaactgggaaaatttcttcgatcccaaggtttccaagataaaaccagagcaggaaagatgatgcaagcgacaggaaaggccctctgcttttcttcccagcaaaggttggccttacgaaatcctttgtgtcgatttcaccaagaagtggagacttttcggcatcgggccatctcagatacttggctgacggtgaaccgcatggaacagtgcaggacggaatatagaggagcactattatggatgaaggacgtgtctcaggagcttgatccagacctctacaagcaaatggagaagttcaggaaggtacaaacacaagtgcgccttgcaaaaaaaaactttgacaaattgaagatggatgtttgtcaaaaagtggatcttcttggagcgagcagatgcaatctcttgtctcacatgctagcaacataccagaccactctgcttcatttttgggagaaaacttctcacactatggcagccatccatgagagtttcaaaggttatcaaccatatgaatttactactttaaagagcttacaagaccctatgaaaaaattagttgagaaagaagagaagaagaaaatcaaccagcaggaaagtacagatgcagccgtgcaggagccgagccaattaatttcattagaggaagaaaaccagcgcaaggaatcctctagttttaagactgaagatggaaaaagtattttatctgccttagacaaaggctctacacatactgcatgctcaggacccatagatgaactattagacatgaaatctgaggaaggtgcttgcctgggaccagtggcagggaccccggaacctgaaggtgctgacaaagatgacctgctgctgttgagtgagatcttcaatgcttcctccttggaagagggcgagttcagcaaagagtgggccgctgtgtttggagacggccaagtgaaggagccagtgcccactatggccctgggagagccagaccccaaggcccagacaggctcaggtttccttccttcgcagcttttagaccaaaatatgaaagacttacaggcctcgctacaagaacctgctaaggctgcctcagacctgactgcctggttcagcctcttcgctgacctcgacccactctcaaatcctgatgctgttgggaaaaccgataaagaacacgaattgctcaatgcatgaatctgtacccttcgggagggcactcacatgccgcccccagcagctcccctgggggctagcagaagtataaagtgatcagtatgctgttttaataattatgtgccattttaataaaatgaaagggtcaacggccctgtttatattggtataattatttactcttatttggtataaagggttttcgtgtatctctatgtggatctaaataatacaggattgtctagaagcggtttccaggccaccgctctcctgcctacatcccatcatggctgctgcggtgtcactgggctaccgtgagatccaagttgaaatcagaagcctactttgatggtaggtttgaatgacgtgtcctacagcctcagaggcagcaggaggctagcaaagcttaaatgcctccttctctgcccccagcctctgtcccccttggaggagggctgtaggaagattccctcttcctgccaagccaccttccagtgagctctggatgaagctctggccaaccaaagacactgtccccacagcaggtgcctggtgggccacgtgttctcacactggtggaggagctgggcttctgtccaaggcacaaaccttactatggaaagcagccatatttgcagataccactgtctccttttgtcctcttcgtggctggaattcaaaagcatgtatttctgaagcctcttgtgacattgttttttttttttttttaattaaacagaaaagatatttgacatgcaaaaaaaaaaaaa

SEQ ID NO: 97 - DNA, 2135 bp, Human
  ARL6IP5
aaagccgaccgagacggagccgctgtcaactctccaactcagctcagctgatcggttgccgccgccgccgccgccagattctggaggcgaagaacgcaaagctgagaacatggacgttaatatcgccccactccgcgcctgggacgatttcttcccgggttccgatcgctttgcccggccggacttcagggacatttccaaatggaacaaccgcgtagtgagcaacctgctctattaccagaccaactacctggtggtggctgccatgatgatttccattgtggggtttctgagtcccttcaacatgatcctgggaggaatcgtggtggtgctggtgttcacagggtttgtgtgggcagcccacaataaagacgtccttcgccggatgaagaagcgctaccccacgacgttcgttatggtggtcatgttggcgagctatttccttatctccatgtttggaggagtcatggtctttgtgtttggcattacttttcctttgctgttgatgtttatccatgcatcgttgagacttcggaacctcaagaacaaactggagaataaaatggaaggaataggtttgaagaggacaccgatgggcattgtcctggatgccctagaacagcaggaagaaggcatcaacagactcactgactatatcagcaaagtgaaggaataaacataacttacctgagctagggttgcagcagaaattgagttgcagcttgcccttgtccagacctatgttctgcttgcgtttttgaaacaggaggtgcacgtaccacccaattatctatggcagcatgcatgtataggccgaactattatcagctctgatgtttcagagagaagacctcagaaaccgaaagaaaaccaccaccctcctattgtgtctgaagtttcacgtgtgtttatgaaatctaatgggaaatggatcacacgatttctttaagggaattaaaaaaaataaaagaattacggcttttacagcaacaatacgattatcttataggaaaaaaaaaatcattgtaaagtatcaagacaatacgagtaaatgaaaaggctgttaaagtagatgacatcatgtgttagcctgttcctaatcccctagaattgtaatgtgtgggatataaattagtttttattattctcttaaaaatcaaagatgatctctatcactttgccacctgtttgatgtgcagtggaaactggttaagccagttgttcatacttcctttacaaatataaagatagctgtttaggatattttgttacatttttgtaaatttttgaaatgctagtaatgtgttttcaccagcaagtatttgttgcaaacttaatgtcattttccttaagatggttacagctatgtaacctgtattattctggacggacttattaaaatacaaacagacaaaaaataaaacaaaacttgagttctatttaccttgcacattttttgttgttacagtgaaaaaaatggtccaagaaaatgtttgccatttttgcattgtttcgtttttaactggaacatttagaaagaaggaaatgaatgtgcattttattaattccttaggggcacaaggaggacaataatagctgatcttttgaaatttgaaaaacgtctttagatgaccaagcaaaaagactttaaaaaatggtaatgaaaatggaatgcagctactgcagctaataaaaaattttagatagcaattgttacaaccatatgcctttatagctagacattagaattatgatagcatgagtttatacattctattatttttcctccctttctcatgtttttataaataggtaataaaaaatgttttgcctgccaattgaatgatttcgtagctgaagtagaaacatttaggtttctgtagcattaaattgtgaagacaactggagtggtacttactgaagaaactctctgtatgtcctagaataagaagcaatgatgtgctgcttctgatttttcttgcattttaaattctcagccaacctacagccatgatctttagcacagtgatatcaccatgacttcacagacatggtctagaatctgtacccttacccacatatgaagaataaaattgattaaaggtttttttggtgagactttatttaaaaaaaaa

SEQ ID NO: 98 - DNA, 5427 bp, Human
  POLR1B
agatgcgacgaggttagcggggcccgaccactccttggcttcccaggggtgagcctcgcgagttaggagttgggtagagagtcagcccggggcccggcatccgctttttcgttgaagcaacgactttggccggatgactccccagggtcggcatcagcgtgggactgggaacaggtgaagggaaacagaagagagcctgagaagaccgctctcctccgatcctaattgactgagccaatgagagccaaagaggtcacatgctcaactgggcggggagcgggtttccacctgcggcatctttcgcgagcggggagatgagtggggcggaatatgggagaaagggagggcccgccacgctctggctggacacggccttaatcggcccgttcactcgacgtttttggttctacgttgaccccgagaaaccgaaaccgcagggcctagggcgggtggaacgagagggaactacatttcccagcaggctgcggaaacgggactgcggccactacttccggcgtgtaccgagagactggcgtccggcgtgtaccgagagactggcgtccggtgtgcaggtggccacatggatcctggcagccggtggcggaacctgcccagcgggcctagcctaaagcacttgactgacccctcttatggaatcccgcgggaacagcaaaaggcagcgttgcaggagctgacgcgggcgcacgtggagtccttcaactacgctgtgcacgagggtctcggcctcgcggtgcaggctatacctccctttgaatttgctttcaaagatgagcgtatctcttttactattctggatgctgttatcagtccacctacagttccaaaagggaccatctgcaaagaggccaatgtttatccagcagaatgccggggccgaaggagtacctaccgtgggaagttgacagctgatatcaactgggcagtgaatggaatctcaaaaggaatcattaagcagtttcttggctatgttcccatcatggtgaaatccaagctttgcaacttacgtaaccttcccccacaagccctcattgagcaccatgaggaggcagaggaaatggggggctattttataatcaatggcattgaaaaagtcatccgaatgttgattatgcctcggagaaattttcccattgcaatgataagaccaaaatggaaaaccagagggcctggttatactcagtatggagtttcaatgcactgtgtgagggaagaacattccgctgtcaatatgaacctccactacttggaaaatggcactgttatgttgaactttatttaccgaaaagaactgttctttcttcctttgggatttgcacttaaggcacttgtcagcttttctgattatcagatctttcaggagctcatcaaaggaaaagaggatgattctttccttaggaactctgtttctcagatgttaaggattgtaatggaagagggttgttcgacacaaaaacaggtccttaactacctaggtgaatgcttcagagtaaaactcaatgttcctgactggtacccaaatgagcaagctgcggagttcctgtttaaccagtgcatctgtatccacttgaaatccaatactgaaaagttttatatgctttgtctcatgacgcgaaagctctttgctttagccaaaggagagtgcatggaggacaatcctgatagtttggtgaaccaggaagtcctcacaccgggtcagctcttccttatgttcctgaaggaaaaactggaaggttggttagtgtctattaaaatagcttttgataagaaggctcagaagaccagtgtttccatgaacactgacaatttgatgaggatttttacaatgggcatagaccttacaaaaccatttgaatacctttttgctactgggaatctgcgttctaaaacaggtcttggcctcctacaagattctggactttgtgttgtggctgacaagctgaacttcatacgctacctctcccatttccgctgcgtgcacagaggggctgattttgccaagatgaggaccaccacagtacgcaggctgctgccagagtcctggggcttcctttgtcccgtgcataccccagacggggagccctgtggcctgatgaaccacctaactgccgtatgtgaggttgtcacacagtttgtgtatacggcatctattccagctttactgtgcaacttgggggtcactcccattgatggagctccccaccgatcatacagtgagtgctaccctgtcctgctggacggtgtcatggttggctgggtggataaggatcttgctccaggcatcgcagattctcttcgtcattttaaggtgttgagagagaaaagaattcctccctggatggaagtggtccttatacccatgacaggaaaaccaagtctgtacccaggattgttcctttttaccactccttgtagactggtacggcctgtgcagaacttagcattgggcaaagaagagctaattggaactatggaacagatcttcatgaatgtcgctatctttgaggatgaagtttttgctggagttaccacacaccaggaactctttccacacagcctgctgagtgtgattgccaacttcatccctttctctgatcacaaccagagtccacggaacatgtaccaatgccagatgggtaagcaaactatgggctttccacttctcacttatcaagaccgatcggataacaaactgtatcgtcttcagactcctcagagtcccttggtgagaccctccatgtatgattattatgacatggataactatccaattgggaccaatgccatcgttgctgtgatttcttacactggctatgatatggaagatgccatgattgtgaataaggcctcttgggaacgaggctttgcccatggaagtgtctacaagtctgagttcatagacctctctgaaaaaattaaacaaggagatagtagcctggtgtttggcatcaaacctggtgacccacgcgttctgcagaagttagatgacgatggattgccgtttataggagcaaaactgcagtacggagatccgtattacagctacctcaacctcaacaccggggaaagttttgtgatgtactataagagtaaagaaaattgtgttgtggataacatcaaagtgtgcagtaatgacactgggagtggaaaattcaagtgtgtttgcatcactatgagagtgcctcggaacccaactatcggagataaatttgccagtcgccatgggcagaagggcattttaagcagattgtggccggctgaggacatgccttttactgagagtgggatggtcccagacattctgttcaatccccatggttttccatcccgcatgaccattgggatgttaattgagagtatggccgggaagtctgcagctttgcatggtctctgccatgatgctacacccttcatcttctcagaggagaactcggccttagaatactttggtgagatgttaaaggctgctggctacaatttctatggcaccgagaggttatatagtggcatcagtgggctagaactggaagcagacatcttcataggagtggtttattatcagcgcttacgccatatggtctcagacaaatttcaagtaaggacaactggagcccgagacagagtcaccaaccagcctattgggggaagaaatgtccagggtggaatccgttttggggagatggaacgggatgcgcttttagctcatggtacatcttttctccttcatgaccgcctcttcaactgctcagatcggtcggtagcccatgtgtgtgtgaagtgtggcagtttactctctccactgttggagaagccacccccttcttggtctgccatgcgcaacagaaaatacaactgtactctgtgtagtcgcagtgacactatcgatactgtttctgtgccttatgtttttcggtattttgtagctgaactggcagctatgaacatcaaagtgaaactggatgttgtttaacttgatgttgaccttttggattaagaggactatcagattaaagcaaaatgtaattttaattcaatgaagatatcattaccaggttactcttgagatttttcaacggtgttagaactctcaaccaagacctgaaaaccaagtatgcaaggtttctgaatctctctggtagattaactattgacaatgattttctgttatctttgttcaaaaagttcatgtcttctcaaaatatgaaatattgataaatggaagagcatacggtgacaagtctcctttccaaccccaggttccctacaccctgctctcagcaggcagtgagtgtcacacacctgttaatccatcttgagcaggacagtactatacaaatagaatgcaagctgtaatgtaattttatattttcttatagccacgttgaagtaaaaacaaacaggtacagtgttttttaccagctttatagaagtacagttgttacatatttaatgaatacaatttgatgggtctgactatatgcacacacctttgataccatcaccacaatcagggtaataaacatacctgtcatctccacaagtttcctcctgcccctttgttttttgctttttggttgctgttgagtttttgttttgtcttctgtggtaagaacacttaactcaagacctaccctcttaacaaatctttaagtgcacgatatagtattgttaattccaggcaccatgttgtacaacagatctttagaccttacttgtcttgcataactgaagctttatacctgttgaacaactctccatttccctggcccctagcaaccacccttctaccctgtttctatgagtttgactattacagatatctcatatagtgggatcatgcaatatttgtcctgtgactggcttatttcacttagcatagtgaaataagattcatccattttggaagccaggcatggtgctgtgcatctatagtccctgctatttgagaggctgaggtgggaggatcatttgagtgcaggagttcaaggacagcctgggtaatataggaagaccctgtcttgaagaccctgacctcaagtgatccacccacctcggcctccgaaagtgctaggattacaggtgtgagccactgtgcctggcctccggtgagtattttatatttagtctacacttccatacttggcttttttctgcttttatattgatctgctttcatagcagtgtgtagagtgccacttatgttttctttcttgtgtacagtattttattgtatggatttaccatcccctgtgtatttaagttgttccattctttggccattataacttttttctgcaaatattctggtgacttatctttggccattataaactgttgataatagatcatcttgtatatacttctgcaattataagatgttttttgatgatgtaaaaaaaaaaaaaaaaa

SEQ ID NO: 99 - DNA, 2900 bp, Human
  UHMK1
ccgggagtcggtgaggcggctgcaggtccctccctgcggagccgctggtccggctggcggagatgtgaccgcgggcccggccggcctgcctcaggcgtcgcgtcagctcccgtgtccgtgcccttaacccacaccgatggcgggatccggctgcgcctggggcgcggagccgccgcgttttctggaggccttcgggcggctgtggcaggtacagagccgtctgggtagcggctcctccgcctcggtgtatcgggttcgctgctgcggcaaccctggctcgccccccggcgccctcaagcagttcttgccgccaggaaccaccggggctgcggcctctgccgccgagtatggtttccgcaaagagagggcggcgctggaacagttgcagggtcacagaaacatcgtgactttgtatggagtgtttacaatccacttttctccaaatgtgccatcacgctgtctgttgcttgaactcctggatgtcagtgtttcggaattgctcttatattccagtcaccagggttgttccatgtggatgatacagcattgtgcccgagatgttttggaggcccttgcttttcttcatcatgagggctatgtccatgcggacctcaaaccacgtaacatattgtggagtgcagagaatgaatgttttaaactcattgactttggacttagcttcaaagaaggcaatcaggatgtaaagtatattcagacagacgggtatcgggctccagaagcagaattgcaaaattgcttggcccaggctggcctgcagagtgatacagaatgtacctcagctgttgatctgtggagcctaggaatcattttactggaaatgttctcaggaatgaaactgaaacatacagtcagatctcaggaatggaaggcaaacagttctgctattattgatcacatatttgccagtaaagcagtggtgaatgccgcaattccagcctatcacctaagagaccttatcaaaagcatgcttcatgatgatccaagcagaagaattcctgctgaaatggcattgtgcagcccattctttagcattccttttgcccctcatattgaagatctggtcatgcttcccactccagtgctaagactgctgaatgtgctggatgatgattatcttgagaatgaagaggaatatgaagatgttgtagaagatgtaaaagaggagtgtcaaaaatatggaccagtggtatctctacttgttccaaaggaaaatcctggcagaggacaagtctttgttgagtatgcaaatgctggtgattccaaagctgcgcagaaattactgactggaaggatgtttgatgggaagtttgttgtggctacattctacccgctgagtgcctacaagaggggatatctgtatcaaaccttgctttaatcagtaacctaaggactgtttcctttttctcctcttccatttcttgggttattccacatatgaatgcaggactacccccttaccattttaagaaggtactttatacatttatttaatcctactaatgtgcagccattgcccaagcagtgactgcgttgcatacatttggcactgagtaggacaagacctctcagctatacattgaggggttttagagcatccatgtgggcaacccttttttgtgcgggagagcaggtgttgctcttcagtatgtagcctaaaaaaatcttaattatttcatggatcatgaagcaaggatgaataatatcatgtcttggtaaatactaacaaatttgttaggtttggtgacatcatttacagattatttctttatgttgtccagtggttcttccttattgttgatatccataagctggcactggatgctctcagtaatgttaagtaattgtcaagcagcagttacctactgtgttcttaacactgagttgtgaattttttcttaaagcagtactgtagtactgaatattcctttaaaggaactgcagtgagcctatctaagtttttttaaattaaggcttttaaaatagaaagctgatgcttgatcttgcacaatttttatgtctagtatgtatgcttgagtgaatgtgtgagtatgaatgattagagaaaatttgagtcagtgtactttatagtgtgaatcctgtgagctaatacagtctatacttatttcttccctacctgtttcacatccgtaagatttaggatatacattttttgagaggtagtctgtctgatacaatgtaaatgacaaaacataattcctgagaggcccagaacaaactggagtctagcctggagttaaattgagacttctaaaatgattggaacaaagactaagttgtgccagatgtaaatcaacccctcttttagtttactttagactttgtattagctcatcttttttgtagtaaatctatagttttaaggtttctcaagatgtggctctacctactatgatgaaaattgaagtgggtcaaaagaattagatgtacagtgaagggaaaagaaaaaaaatgggcgaagagagggtggaaaataaaaggattcttttttcttcctttctgtttctcgtatccctgctccctttttcctccccttccctcattctttgcctctatccttagctgaagacaaactagaggagcagcatcccaggtagtttggcttttgactgcaaggtagttaagaaaggtgtagatataatgaggtagaagtagaaaggaagaaaaactcaaagaattctgaaaaggattcatagcaacataatgtgtccctgagtagaggatgctgctatgcgtgagttcatggacacaagttgattacatggtttttagaattataattatggattcttcttatttcatggtaggttgtctttaaagatataaaaattaggatgcctttatgaagcactgattatacc

SEQ ID NO: 100 - DNA, 1847 bp, Human
  CHMP4C
ggaaatgccctggagtgtgtgtcacctgtccaggacgacttgttgattcccaggagggccgcctttccggtctgggtccccgagaggactgccttgctcacctgtcccctcggcgcggccccggggagctcccgagaggcccccgggatcgctggccctccgaactccacagcaatgagcaagttgggcaagttctttaaagggggcggctcttctaagagccgagccgctcccagtccccaggaggccctggtccgacttcgggagactgaggagatgctgggcaagaaacaagagtacctggaaaatcgaatccagagagaaatcgccctggccaagaagcacggcacgcagaataagcgagctgcattacaggcactaaagagaaagaagaggttcgagaaacagctcactcagattgatggcacactttctaccattgagttccagagagaagccctggagaactcacacaccaacactgaggtgttgaggaacatgggctttgcagcaaaagcgatgaaatctgttcatgaaaacatggatctgaacaaaatagatgatttgatgcaagagatcacagagcaacaggatatcgcccaagaaatctcagaagcattttctcaacgggttggctttggtgatgactttgatgaggatgagttgatggcagaacttgaagaattggaacaggaggaattaaataagaagatgacaaatatccgccttccaaatgtgccttcctcttctctcccagcacagccaaatagaaaaccaggcatgtcgtccactgcacgtcgatcccgagcagcatcttcccagagggcagaagaagaggatgatgatatcaaacaattggcagcttgggctacctaaactaaaacacatttttgatacctaaattaatgagctatagataaaatataaaaaatgtttttaccaagttcagaagttaacaaagactctgctttataattatattgaatgaataattgtgttttaagcctcctaagtaaaagtaaaaaaggagtcatgtgcatacatagaatcagtgatggaggccaggcacggtatctcatgcctataatcccagcactttgggaggctgaggcagttgagaccaggagttcgagtccagcctgaccaacatgaagaaaccctgtctgtactaaaaatacaaaaattagccggacatggtggcaggcacctgtaatcccagctacttgggaggctgagtcaggagaatcgcttgagcccaggagatggaggttgcagtgagccaagatcatgccactgcactccagactgggcaacagagggagactccgtctcaaaaactaaaaaaaaaaaatacatttagtatagcggggggtgggggggagaaataatgttatttcctatgcgaatgacgtgtatccctgtacccatggtaaatgtaaatatactgtgtctcttttgggagagccttttagtagaggagtcttatatgagtctctacataagtagtttcacttgagttttgcagtttgaaatcttaaaggagctttaattgacatttattataccaattaagcttggaatggggcaatggatgcatttcccaaaacgtgtgaaagcactaacagcttatattgctgaatgagaatctcctgggtgtaatttagccacttagggaactgcgtgaacactcccaggccattatgatgctgttacagcttcagtgtataaatgcatgagtattctttctgttctgttttgtgctctcttgtacatttatttaccctttacagaatatttcttgtaaatacataaaaatattggcaattaaaagtacatcttgaataaaa

SEQ ID NO: 101 - DNA, 8152 bp, Human
  SPATA5
aagtttttctctcagttgaagcgcgcacattgagtcggcttttctactgcttcggctagggtaccttgtgaccatgtcttccaagaagaatagaaagcggttgaaccaaagcgcggaaaatggttcgtccttgccctctgctgcttcctcttgtgcggaggcacgggctccttctgctggatcagacttcgcggcaacctccgggactctgacggtgaccaacttattagaaaaggtagatgacaaaattcctaaaacattccagaattcccttattcatcttggactcaacactatgaagtctgcaaatatatgtataggtcgaccagtgttgcttactagtttgaacggaaagcaagaggtgtatacagcctggcctatggcaggatttcctggaggcaaggtcggcctgagtgaaatggcacagaaaaatgtgggtgtgaggcctggtgatgccatccaggtccagcctcttgtgggtgctgtgctacaggctgaggaaatggatgtggcactgagtgacaaagatatggaaattaatgaagaagaactgactggttgtatcctgagaaaactagatggcaagattgttttaccaggcaactttctgtattgtacattctatggacgaccgtacaagctgcaagtattgcgagtgaaaggggcagatggcatgatattgggagggcctcagagtgactctgacactgatgcccaaagaatggcctttgaacagtccagcatggaaaccagtagcctggagttatccttacagctaagccagttagatctggaggatacccagatcccaacatcaagaagtactccttataaaccaattgatgacagaattacaaataaagccagtgatgttttgctggatgttacacagagccctggagatggcagtggacttatgctagaggaagtcacaggtcttaaatgtaattttgaatctgccagagaaggaaatgagcaacttactgaagaagagagactgctaaagttcagcataggagcaaagtgcaatactgatactttttattttatttcttcaacaacaagagtcaattttacagagattgataaaaattcaaaagagcaagacaaccaattcaaagtaacttatgacatgataggaggattaagtagccagctgaaagcaattagagaaataattgaattgcccctcaaacagcctgagcttttcaagagttatggaattcctgcccctagaggagtgttactttatggtcctccaggtactggaaaaacaatgatcgccagggctgttgctaatgaagttggagcctatgtttctgtaattaatggtcctgaaattataagcaaattctatggtgagactgaagcaaagttacgtcagatatttgctgaagccactctacgacacccatcaattatttttattgatgagctggatgcactttgtccgaaaagagagggggcccagaatgaagtggaaaaaagagttgtggcttcactcttaacactgatggatggcattggttcagaagtaagtgaaggacaagtgttggttcttggggccacaaatcgccctcatgccttggatgctgctctccgaagacctgggcgatttgataaagagattgagattggagttcccaatgctcaggaccggctagatattctccagaaactgcttcgaagggtaccccatttgctcactgaggctgagctgctgcagctggcaaatagtgctcatggatacgttggagcagacttgaaagtcttgtgtaatgaagcaggtctctgtgccttgcggagaatcctgaaaaaacagcctaacctccctgatgtcaaggtggctggactggtgaagattactctgaaggatttcttgcaggcaatgaatgatatcagacccagtgccatgagggaaatagcaattgatgtcccaaatgtatcctggtcagatataggaggactggaaagtatcaaactgaagttggaacaggctgtggaatggcccttaaaacatccagagtctttcattcgaatgggtattcagccacctaaaggagttcttctctatgggccacctgggtgctctaaaacaatgatagcaaaggctttggccaatgagagtggactgaattttctagctataaaggggcctgaattaatgaataaatatgttggtgaatctgaaagagcagttagagagaccttccgaaaagcaagagcagtggcgccttccattattttctttgatgaactggatgccttagcagttgaaaggggcagttctttaggtgctgggaatgtagccgatcgtgttttggctcagctcttaacagaaatggatgggattgaacagctaaaggatgtgaccattttggcagctactaaccgtccagataggatagacaaggctttgatgcggcctggaagaattgatagaatcatctatgtgcctttaccggatgcagcaacaagaagggaaatatttaagctgcagtttcactccatgcctgtcagtaatgaagttgacctggatgaactcatccttcaaaccgacgcatactcaggagcagagattgtagctgtctgcagagaggcagctcttctggctctggaagaagacattcaagccaatctcatcatgaaaagacatttcactcaggccttgagcactgtgacacctagaattcctgagtcattgagacgtttttatgaagattatcaagagaagagtgggctgcatacactctgagaaaatatatatattcaagatgctgaaaatcctttccagagaaaatttgtttctttttaaaattttttgagagtgttaaaaaaaattttactaggcaaaatgtttgaagtatgttcagtagaatttaggggctttggttcttacagattttcaagtcatgtaagtacagtgaaaatatctctgagcataagtttcaatcagttttacctggaaatttgtggtgtggtttaaaaaacaaatgtttagctttttcatttgcgacctagtctgttcatcccatgaagcgatttctttttccagaatctgtttgagtgtctttctaaaatgccaaacatgttggcatcaattttatacagggatataaaaaagtatatgtggataaattttttgtaatctttagggatataaaaaagtgtatgtggataaattttttgtaatctttatttttgaaggccagccagtaaaatggcccaatgtgccagccaggcttatgtggccttgttttcaaatatacatatatgtgttatcattaaaattcatatatgcatttttgttttagccttcttaatctctacctatggccaaaaaaattttttttgagagatattttgtataatacaatgccctttgaaagtgtaagcccactctaagcctagatcagtaggcttgggttttttttgttgttgttttgtcttttttttttttttttgagacagagtctcactctgtcacctaagctggagtgcagtggcacgatcttggctcactgcaacctccgcctcctgagttcaagcaattctcctgcctcaacctcctgagtagctgggactacaggtgtgcaccaccacacgcagctaatttttatatttttagtagagacaaggtttcaccatgttagccaggccggtctcgaactgctggcctcaggtgacccacccacctgagcctcccaaagtgctgggattacaggcgtgagccaccatacctggagaggttttgtgtttttgtttttttttcataaaatgcttttaataaatcatatgaagcattcatgtttttacttatacatattttcagggtaccagtaaactttttagttcaaagataggccaaattgtacttttttttttttatgagacagagtctcgctgctctgtcgcccaggctagagtgcagtggcgtgatctaggctcactgcaagctctgcctcctgggtttacttacgccattctcccgcctcagcctcctgagtagctgggactacaggtgcccaccaccatgcctggctaatttttttttttttttttttttattagagacagggtttcaccgtgttagccaggatgatctcgatctcctgacctcgtgatccgcccgcctcggcctcccaaagtgctgggattacaggcatgagctactgcgccctgccgccaaattgtaatcttaaacatattatgttgcattctaaatatgtatatttatgcttcttgttatttatcctcaggatttcttcacactttattacttcataaatactcttgaaaaagctttcagaaagtgattctctgacttcagatcagaaactggcaatgggaagaatgtgcacttaaacttgatcactgtagatctttgaaaattcccagaaagacaaatcagacaagaaatacctgattatcaaaataatgggctatacagttttgtggtggcatacattccttgtttgtttgtttagagataggatcttgttgtgtcacccaggctggaatgcagtggcacagtcgtagctcactgcaccttcaaactcctggagctcaagtgatcctcctgactcagcctcctgagtagctaggacaacaggtgcacactgccatgtcaggctaatttttttttttaaacagagagacagagtcttgctgtgttgcccaggctggtctccaactcctggcctcaggtgaccctcctgcctcagcttcccaaagggctgagattacaggtgtgagccaccatgcccagcctgtggtgacatatattctgaagtcacatctcaaatatttaatcctcaaatatatttacatcctcaaaaatatcagattttcaagacaacactggtttaccagtacataaacccacctaggggacaaagaatattaccacttagaactgtgttgtcaaatacaataaccactaattgtatctgaccattttaattaaattaattacaattaaataatatttaagaattagtttatcagacatatcagccacatttcaaatgctcaatagctacatgtggcaagggtctgccacactggacagagtagaaaacattcccatcattcagaaggttctcttggacgctgcagatctggaaaacaagacttccatattgaaataaatacaacctcaaaacttttatgctctgtgttccctttagttgttatctacatagaaaattatgaaacaagagaggaacttaccttcttccctattaaatatatggctaagggcacaagaaaataagaggaaaacttatccttcagggcctaaacaaggaaatgaaagaaatctcattcccaatagaataaaaaccagaagcttgaaatgactctggtgcaggaggctgggtggtggggaggagggtagcagtctcaatcaacaagtttagatattaatagccactcaaagccttcagcccatataacatgaagtgacaactgagctctgcacataatgctcaagctctataataaccaacactctcagcacaagggtagacaagaaaagaaaaatctcctgctggccaggaagaccacaaggaggctttctgacttggcctgtgcttttgatttttaaaacattttttaaaagaggcctctctgggctgggcgcggtggctcatgcctgtaatcccagcactttgggaggccgaggcaggcggatcacgaggtcagaagatcaagaccatcctggctaacacagtgaaaccccgtctctactaaaaattcaaaaaattagccgggaatggtggtgggcgcctgtagtcccagttactcgggaggctgaggcaggagaatggcgtaaacccgggagacggagcttgcagtgagctgagattgcgccactgcactccagcctgggtgacagagtgagactccgtctcaaaaaaaaaaaaaaaaaaacctctgagaattctgactatgagcttacctgcccatggctttagaatgatttgaattcacactaccttcaaattcatgaaacctcaaaacctacaaattaacctaaaaacatggagccaagctaaaaatgccctgggggtaactagcacttggactagttacaggaatgtagcttcgtctcagaggattccaaaagctaatgccttgcttaccaagggcttgtaatctcacaggatgtgatgggtggggcctcagatctgctgatgggagcataaattggtacaaccactttggaaggcaactggctatctagcaaagttgaagaccctacaatctaacagttctcctaggtgcatatcccagagcaagtctcacattgatgcagtgagatagtgaataggaaagttcatagcaccattatttttaagtagtaagaacccggaaacaatctaaatatccatcagtaatagatatatgtgatagtcatacaatggaatactgtggcaataaaaaataattagagctacatatgaaatagggatgaaacatggatgaacaaagaatgttttagaggaatatgatatttaaaatttgaagcatgaaaaatatgtgtttatgggggcatatatagtggaagaataaatgaatagaaaagaaaagcaccaaatactggtgaggaatttcctcaggggagaaaagttgagctgcttcaattgtgtcagtaatgtttcatatcttagggtgggtgatgggaatataggtgctgatttaatatagtctgtactttttgtgtacctaaatatttcgtgataatttttaaaagatgggccttaaaccaatacagtcatatcatttaactcaattccatgaatttacaatgcaatccacagtgcccacaaccccatgtttctggaaaatcaggagtattgggtacaatggaataaaatgcaagaaggcaaataagagatcaggcttttaggacctaggaaacaaataaagaggaatttgttgctgaaagtaatgtgtagctgacactctcattacctgacacaatgggagacattatgtctgggaataagacatctatttccatagcactgtagtcctgcaaaggagttggaagttatgaatttttaaagattttagaacattatatctttagtctctcataagccaattatttatatctccacatagcccattattaccattgaaaaggcatgcaattcttctatttgaagcttgttccctttttacaaaagtactagtaaaaatctgagtcatacaaaagagcaggtcaggtgtcactaataacagtttacctcagcttcatctccatgaaggttttacttctaatcccagagtctcatgtttatgtattacaagagtgtatgaaagctgggcatggtggcacacaccagtagtcccagctactcggtcgggggttgaggtgagaggatcgcttgaactcaggagtttgaatccagcctggtcaatgtagcgagatcctatctcttaaaaaaaaaaaaaaaaggggggaacagtgtatgatcctattatttgggtttgtgtgtgatcgaatacatggtatatagttcatggaaaatttaagctcagcaaggaaagaaaatggccagcttcctgtcttaggaagacaatttactttttggcatctgtttggttgaaagtttgcctttgatccagattctttcggatgtcagggatattcacattgacatgtctttttagtgttccaggagattttagtttgaatagtacaattttttcttcttacaacaaaacttagaacggcttctaacttatttcttcatggccaagaaactaccctaacttatctcgataaatatttagttctgtcttatttctaatgtgtaaaacaggttttaaaaataatatatagattttgcatttataaaaaaagatttaatttatagaaccaaacttgaacatatgtttaatttagcctaatcagaaggttacagaaaaagttgctgtaaagatagaataaaggtattgtactggtctgtttttactgaagttccagaatgtgaggttattagagtcttggcttattgtgtcatgttttcctgaatgcttcctttgaagatgagcacacaccaaagcatcctttgatattatgtatggattaaattaacactgctttccaaatgtggtccacatagaaaaaaaaaaaaaa

SEQ ID NO: 102 - DNA, 4043 bp, Human
  BRAP
agcgacggcggccgggaggcggaagtggaggttgttgtggctccgagggctgttcgaggagctgctgctgctgaggcggcggcaactgcattgaggtggtggcggcgctgccggccccgggccgctcggcctctcggctcgccttccagcctcgcctgagcccgccggggcccgcgccggccagcgcctgccctatgagtgtgtcactggttgttatccgattggagctcgcggaacactcgcctgtccccgccggcttcggcttcagcgccgcggccggggaaatgtctgatgaggagataaaaaagacgacactagcctcagctgtagcctgtttagaaggcaagtcaccaggagagaaagtagcgattatccatcagcatctcggccgtcgagaaatgacagatgtgatcattgagaccatgaagtccaacccagatgaactaaaaactacagtggaagaaaggaagtcttcagaagcctcccccactgcgcaaagaagtaaagatcacagtaaggaatgcataaacgctgccccagattctccgtccaaacagcttccagaccagatttcattcttcagtggaaatccatcagttgaaatagttcatggtattatgcacctatataagacaaataagatgacctccttaaaagaagatgtgcggcgcagtgccatgctgtgtattctcacagtccctgctgcaatgaccagtcatgaccttatgaagtttgttgccccatttaacgaagtaattgaacaaatgaaaattatcagagactctactcccaaccaatatatggtgctgataaagtttcgtgcacaggctgatgcggatagtttttatatgacatgcaatggccgccagttcaactcaatagaagatgacgtttgccagctagtgtatgtggaaagagctgaagtgctcaaatctgaagatggcgccagcctcccagtgatggacctgactgaactccccaagtgcacggtgtgtctggagcgcatggacgagtctgtgaatggcatcctcacaacgttatgtaaccacagcttccacagccagtgtctacagcgctgggacgataccacgtgtcctgtttgccggtactgtcaaacgcccgagccagtagaagaaaataagtgttttgagtgtggtgttcaggaaaatctttggatttgtttaatatgcggccacataggatgtggacggtatgtcagtcgacatgcttataagcactttgaggaaacgcagcacacgtatgccatgcagcttaccaaccatcgagtctgggactatgctggagataactatgttcatcgactggttgcaagtaaaacagatggaaaaatagtacagtatgaatgtgagggggatacttgccaggaagagaaaatagatgccttacagttagagtattcatatttactaacaagccagctggaatctcagcgaatctactgggaaaacaagatagttcggatagagaaggacacagcagaggaaattaacaacatgaagaccaagtttaaagaaacaattgagaagtgtgataatctagagcacaaactaaatgatctcctaaaagaaaagcagtctgtggaaagaaagtgcactcagctaaacacaaaagtggccaaactcaccaacgagctcaaagaggagcaggaaatgaacaagtgtttgcgagccaaccaagtcctcctgcagaacaagctaaaagaggaggagagggtgctgaaggagacctgtgaccaaaaagatctgcagatcaccgagatccaggagcagctgcgtgacgtcatgttctacctggagacacagcagaagatcaaccatctgcctgccgagacccggcaggaaatccaggagggacagatcaacatcgccatggcctcggcctcgagccctgcctcttcggggggcagtgggaagttgccctccaggaagggccgcagcaagaggggcaagtgaccttcagagcaacagacatccctgagactgttctccctgacactgtgagagtgtgctgggaccttcagctaaatgtgagggtgggccctaataagtacaagtgaggatcaagccacagttgtttggctctttcatttgctagtgtgtgatgtagtgaatgtaaagggtgctgactggagagctgatagaaaggcgctgcgttcgaaaaggtcttaagagttcactaacctcacattctaatgaccattttgccttcctgcttggtagaagccccaactctgctgtgcatttttccattgtatttatggagttggcgtatttgacattcagttctggggtaggtttaagatgttaagttatttcttgtaacctcaaaggtaaggttatctagcactaaagcaccaaacctctctgagggcataacagctgctttaaagagaggtttccattggctattaaggagttatgaaaactccctagcaatagtgtcatatcattatcatctcccccttcctctggggagtggaagaattgcttgaatgttatctgaaaagaggcctggtagtaaaccaggccctggctctttaccagcagtcatctcttcttgctctggggccagccaggaaaaacaaacaacccggggcacattgggtagactcagtgtaggaaaaatggtggcagctccactgtttatttttggtgacttcgtacatcattatgaaccgcaattaaggaggaggcttaatggctgttcccaaactcaaatctcagagtgggtatcctagcatctagcaagactgagtggggagatttctcatccgtgtgaaaatgtagagtgaggcctctgactagctaattgtgtattttgttgggtttagtattttctaaatgtttacaaaatattgggctgcatgttcaggttgcagctagagggagcttgggcagattttcaattacgctttcaagatataaccaaaagctgtttctaaatcctaaaattagaatttcaacagagccccctttagaacagtcatataacgcttgtgtgggccaacagaggggctgtgtactctctctggaaccataaatgtcaaataatttataacctgcagtaattgagcaaacttaaaataagacctgtgttggaatttagtttcttgaagaggtagagggataggttagtaagatgtattgttaaacaacaggttttagtttttgctttataattagccacaggttttcaaatgatcacatttcagaataggtttttagcctgtaattaggcctcatcccctttgacctaaatgtcttacatgttacttgttagcacatcaactgtatcactaatcaccatctgtttttgtgggatgtgctgcagcatttcccaaaaaactttacgtgtaatgttgcaaaatgaatgtactcagacattcttaatttttacttagggcagaccaactctttgagtctctcttggacttatatatacagatatcttaagagtgggaatgtaaagcataacctaattctctttcctatagagattctattttatttaaaatctatttttacactagttagaatcctgctgttttggccaagtacttgtcttgcatgtctgaccttgcagaagctggggtggatcatagcatactaatgaagagaattagaagtagtttacaaagctcgctcactcctcatttctctgtgatcccttctatccagtggccccaccaccacctgggaaaacagatttttcagtacaggtgggataaatgctctgaaaggctgtgcccagaggaatgagcaaataggcaagtgtttccaaactacttggaggtttacaaaaaatatgtcccagaaaaaaaaaaaatcttaccaagatacgtaaagaaaaaaaaatttttttttaaacagtcaaagagtcatgtttgaatttcacaaaatcacatcagacagaagttgttttcttcaggagggaaatgaaccacttaatatacccatactaccttgaacaatgaaattgaattaaaatagccaaactttgaaattaaaaaaaaaaaaaaaaaa

SEQ ID NO: 103 - DNA, 9727 bp, Human
  TPR
gcgcaagaggatcagggatagcctctgagctcgggttcccagggttcgtagcttccaacggctgcgcgcgcacttcggtcgcgggcggtgaggtgctgttgctgaaacgctgccgctgagggtggactcgatttcccagggtcccgccgcgggagtctccggcgggcgggcgcgcgcgagccaccgagcgaggtgatagaggcggcggcccaggcgtctgggtcctgctggtcttcgcctttcttctccgcttctaccccgtcggccgctgccactggggtccctggccccaccgacatggcggcggtgttgcagcaagtcctggagcgcacggagctgaacaagctgcccaagtctgtccagaacaaacttgaaaagttccttgctgatcagcaatccgagatcgatggcctgaaggggcggcatgagaaatttaaggtggagagcgaacaacagtattttgaaatagaaaagaggttgtcccacagtcaggagagacttgtgaatgaaacccgagagtgtcaaagcttgcggcttgagctagagaaactcaacaatcaactgaaggcactaactgagaaaaacaaagaacttgaaattgctcaggatcgcaatattgccattcagagccaatttacaagaacaaaggaagaattagaagctgagaaaagagacttaattagaaccaatgagagactatctcaagaacttgaatacttaacagaggatgttaaacgtctgaatgaaaaacttaaagaaagcaatacaacaaagggtgaacttcagttaaaattggatgaacttcaagcttctgatgtttctgttaagtatcgagaaaaacgcttggagcaagaaaaggaattgctacatagtcagaatacatggctgaatacagagttgaaaaccaaaactgatgaacttctggctcttggaagagaaaaagggaatgagattctagagcttaaatgtaatcttgaaaataaaaaagaagaggtttctagactggaagaacaaatgaatggcttaaaaacatcaaatgaacatcttcaaaagcatgtggaggatctgttgaccaaattaaaagaggccaaggaacaacaggccagtatggaagagaaattccacaatgaattaaatgcccacataaaactttctaatttgtacaagagtgccgctgatgactcagaagcaaagagcaatgaactaacccgggcagtagaggaactacacaaacttttgaaagaagctggtgaagccaacaaagcaatacaagatcatcttctagaggtggagcaatccaaagatcaaatggaaaaagaaatgcttgagaaaatagggagattggagaaggaattagagaatgcaaatgaccttctttctgccacaaaacgtaaaggagccatattgtctgaagaagagcttgccgccatgtctcctactgcagcagctgtagctaagatagtgaaacctgggatgaaactaactgagctctataatgcttatgtggaaactcaggatcagttgcttttggagaaactagagaacaaaagaattaataagtacctagatgaaatagtgaaagaagtggaagccaaagcaccaattttgaaacgccagcgtgaggaatatgaacgtgcacagaaagctgtagcaagtttatctgttaagcttgaacaagctatgaaggagattcagcgattgcaggaggacactgataaagccaacaagcaatcatctgtacttgagagagataatcgaagaatggaaatacaagtaaaagatctttcacaacagattagagtgcttttgatggaacttgaagaagcaaggggtaaccacgtaattcgtgatgaggaagtaagctctgctgatataagtagttcatctgaggtaatatcacagcatctagtatcttacagaaatattgaagagcttcaacaacaaaatcaacgtctcttagtggcccttagagagcttggggaaaccagagaaagagaagaacaagaaacaacttcatccaaaatcactgagcttcagctcaaacttgagagtgcccttactgaactagaacaactccgcaaatcacgacagcatcaaatgcagcttgttgattccatagttcgtcagcgtgatatgtaccgtattttattgtcacaaacaacaggagttgccattccattacatgcttcaagcttagatgatgtttctcttgcatcaactccaaaacgtccaagtacatcacagactgtttccactcctgctccagtacctgttattgaatcaacagaggctatagaggctaaggctgcccttaaacagttgcaggaaatttttgagaactacaaaaaagaaaaagcagaaaatgaaaaaatacaaaatgagcagcttgagaaacttcaagaacaagttacagatttgcgatcacaaaataccaaaatttctacccagctagattttgcttctaaacgttatgaaatgctgcaagataatgttgaaggatatcgtcgagaaataacatcacttcatgagagaaatcagaaactcactgccacaactcaaaagcaagaacagattatcaatacgatgactcaagatttgagaggagcaaatgagaagctagctgtcgcagaagtaagagcagaaaatttgaagaaggaaaaggaaatgcttaaattgtctgaagttcgtctttctcagcaaagagagtctttgttagctgaacaaagggggcaaaacttactgctaactaatctgcaaacaattcagggaatactggagcgatctgaaacagaaaccaaacaaaggcttagtagccagatagaaaaactggaacatgagatctctcatctaaagaagaagttggaaaatgaggtggaacaaaggcatacacttactagaaatctagatgttcaacttttagatacaaagagacaactggatacagagacaaatcttcatcttaacacaaaagaactattaaaaaatgctcaaaaagaaattgccacattgaaacagcacctcagtaatatggaagtccaagttgcttctcagtcttcacagagaactggtaaaggtcagcctagcaacaaagaagatgtggatgatcttgtgagtcagctaagacagacagaagagcaggtgaatgacttaaaggagagactcaaaacaagtacgagcaatgtggaacaatatcaagcaatggttactagtttagaagaatccctgaacaaggaaaaacaggtgacagaagaagtgcgtaagaatattgaagttcgtttaaaagagtcagctgaatttcagacacagttggaaaagaagttgatggaagtagagaaggaaaaacaagaacttcaggatgataaaagaagagccatagagagcatggaacaacagttatctgaattgaagaaaacactttctagtgttcagaatgaagtacaagaagctcttcagagagcaagcacagctttaagtaatgagcagcaagccagacgtgactgtcaggaacaagctaaaatagctgtggaagctcagaataagtatgagagagaattgatgctgcatgctgctgatgttgaagctctacaagctgcgaaggagcaggtttcaaaaatggcatcagtccgtcagcatttggaagaaacaacacagaaagcagaatcacagttgttggagtgtaaagcatcttgggaggaaagagagagaatgttaaaggatgaagtttccaaatgtgtatgtcgctgtgaagatctggagaaacaaaacagattacttcatgatcagatcgaaaaattaagtgacaaggtcgttgcctctgtgaaggaaggtgtacaaggtccactgaatgtatctctcagtgaagaaggaaaatctcaagaacaaattttggaaattctcagatttatacgacgagaaaaagaaattgctgaaactaggtttgaggtggctcaggttgagagtctgcgttatcgacaaagggttgaacttttagaaagagagctgcaggaactgcaagatagtctaaatgctgaaagggagaaagtccaggtaactgcaaaaacaatggctcagcatgaagaactgatgaagaaaactgaaacaatgaatgtagttatggagaccaataaaatgctaagagaagagaaggagagactagaacaggatctacagcaaatgcaagcaaaggtgaggaaactggagttagatattttacccttacaagaagcaaatgctgagctgagtgagaaaagcggtatgttgcaggcagagaagaagctcttagaagaggatgtcaaacgttggaaagcacgtaaccagcatctagtaagtcaacagaaagatccagatacagaagaatatcggaagctcctttctgaaaaggaagttcatactaagcgtattcaacaattgacagaagaaattggtagacttaaagctgaaattgcaagatcaaatgcatctttgactaacaaccagaacttaattcagagtctgaaggaagatctaaataaagtaagaactgaaaaggaaaccatccagaaggacttagatgccaaaataattgatatccaagaaaaagtcaaaactattactcaagttaagaaaattggacgtaggtacaagactcaatatgaagaacttaaagcacaacaggataaggttatggagacatcggctcagtcctctggagaccatcaggagcagcatgtttcagtccaggaaatgcaggaactcaaagaaacgctcaaccaagctgaaacaaaatcaaaatcacttgaaagtcaagtagagaatctgcagaagacattatctgaaaaagagacagaagcaagaaatctccaggaacagactgtgcaacttcagtctgaactttcacgacttcgtcaggatcttcaagatagaaccacacaggaggagcagctccgacaacagataactgaaaaggaagaaaaaaccagaaaggctattgtagcagcaaagtcaaaaattgcacacttagctggtgtaaaagatcagctaactaaagaaaatgaggagcttaaacaaaggaatggagccttagatcagcagaaagatgaattggatgttcgcattactgcgctaaagtcccaatatgaaggtcgaattagtcgcttggaaagagaactcagggagcatcaagagagacaccttgagcagagagatgagcctcaagaaccttctaataaggtccctgaacagcagagacagatcacattgaaaacaactccagcttctggtgaaagaggaattgccagcacatcagacccaccaacagccaatatcaagccaactcctgttgtgtctactccaagtaaagtgacagctgcagctatggctggaaataagtcaacacccagggctagtatccgcccaatggttacacctgcaactgttacaaatcccactactaccccaacagctacagtgatgcccactacacaagtggaatcacaggaagctatgcagtcagaagggcctgtggaacatgttccagtttttggaagcacaagtggatccgttcgttctactagtcctaatgtccagccttctatctctcaacctattttaactgttcagcaacaaacacaggctacagcttttgtgcaacccactcaacagagtcatcctcagattgagcctgccaatcaagagttatcttcaaacatagtagaggttgttcagagttcaccagttgagcggccttctacttccacagcagtatttggcacagtttcggctacccccagttcttctttgccaaagcgtacacgtgaagaggaagaggatagcaccatagaagcatcagaccaagtctctgatgatacagtggaaatgcctcttccaaagaagttgaaaagtgtcacacctgtaggaactgaggaagaagttatggcagaagaaagtactgatggagaggtagagactcaggtatacaaccaggattctcaagattccattggagaaggagttacccagggagattatacacctatggaagacagtgaagaaacctctcagtctctacaaatagatcttgggccacttcaatcagatcagcagacgacaacttcatcccaggatggtcaaggcaaaggagatgatgtcattgtaattgacagtgatgatgaagaagaggatgatgatgaaaatgatggagaacatgaggattatgaagaggatgaggaagatgatgatgatgatgaagatgacacagggatgggagatgagggtgaagatagtaatgaaggaactggtagtgccgatggcaatgatggttatgaagctgatgatgctgagggtggtgatgggactgatccaggtacagaaacagaagaaagtatgggtggaggtgaaggtaatcacagagctgctgattctcaaaacagtggtgaaggaaatacaggtgctgcagaatcttctttttctcaggaggtttctagagaacaacagccatcatcagcatctgaaagacaggcccctcgagcacctcagtcaccgagacgcccaccacatccacttcccccaagactgaccattcatgccccacctcaggagttgggaccaccagttcagagaattcagatgacccgaaggcagtctgtaggacgtggccttcagttgactccaggaataggtggcatgcaacagcatttttttgatgatgaagacagaacagttccaagtactccaactcttgtggtgccacatcgtactgatggatttgctgaagcaattcattcgccgcaggttgctggtgtccctagattccggtttgggccacctgaagatatgccacaaacaagttctagtcactctgatcttggccagcttgcttctcaaggaggtttaggaatgtatgaaacacccctgttcctagctcatgaagaagagtcaggtggccgaagtgttcccactactccactacaagtagcagccccagtgactgtatttactgagagcaccacctctgatgcttcggaacatgcctctcaatctgttccaatggtgactacatccactggcactttatctacaacaaatgaaacagcaacaggtgatgatggagatgaagtatttgtggaggcagaatctgaaggtattagttcagaagcaggcctagaaattgatagccagcaggaagaagagccggttcaagcatctgatgagtcagatctcccctccaccagccaggatcctccttctagctcatctgtagatactagtagtagtcaaccaaagcctttcagacgagtaagacttcagacaacattgagacaaggtgtccgtggtcgtcagtttaacagacagagaggtgtgagccatgcaatgggagggagaggaggaataaacagaggaaatattaattaaatggtctgtaaacaataacaactgtgaataagattatcaaatctgttttagtgtaatgattgtcaagtttaaaaacatttttatatataaactggtatactcatgtcaatattctttattaataaaatgtttttcagtgtcaaaatttattattcatttcttcattagttgactcctcctttgctcatcagtctaaggacagttgtaccagactttggataaggtctgcccagaacgagtagtaattgctcttgctgttctactaggcacatcaatgttatagtattgatctaaatggaagagaaaacatttttttagttaaaaagaaaacaatgcccaaactaaaaaataacttatgttgactattatgctcaaagacaatgtttatcattttaatagagatgtttttactaattaatttgaactttataacaaaaagaaaaacaattgcctagacttttcagcttttttgatgtttcaaaagattgacatttcaccatctttttgtaaaatcaggttcagctctcctttatgaagtaaacattaaagagtaaccaagtttgaaaaataatttacttggggttattccttttaaaaaatacatgccaatgtcattcatattatgaaattacaggcagaataacttagatttctgggcatttcaaagaaaagcatcctgagtaatataatttaattaataaaattagtttctcaggaacttctttctgatcttacagactctgcagtgatgcaaatcattataaccttgtgccaaacaaggtatctgttaaatgccacaaatgatagaagtaaaatactattgtcagtagcaagtttactctagtaactggatgttttatcgtaatctcatgaaggttagagcagaattgaattgcagtgccatcattttaattgaaattaaagcaaaagtcttaactcttttccacagcaattagaataagtaccgtagtgtaacttctcacattcagtcatcattgcagccagcatttttactttatcttcatgttttcacaaatgatatcacctccttgggaaactgttagttaataccttacctttagaaaaggcatagtaatcatagccgtcaggttttctgatgttgggcagtgatatagctgaggtaaccacatttggaagtcctctccacagtatactcactttaacttcattatgaaggacacctgtaagtggcatgtttaataaaagataccagattaaaaggcaatgtactatcttggaaagagccagacatctgagttttaatctcagttttagccctctgatgtagaactattgagggttatagactggtatataatgttcttggtaagaagtacttgataaatagtattggttataactaacaaacctgaacaaactgctttacttacccacaaggaaaaagaaagtattggtctttggttattcactaaggcaagtggatgagtttttcatcagtaagcttaaattattagggctgtttgatcagtatccatatttcataagccttactgtataagaaactgtattacatctacttatgtttaaggatttttttaacacaataaaaatgttacctttgtcttgataagccagtctggcaggtgaatattgaattctgatggtgtgtgtttgagaaggtcctatagcacgttcaaagcgacgtctcctaacctgtgtcgtttctccatacactggataatttagagcaggccttcttccagggcacttctgtacaggttcctgtttataaatatactgctgaatgctgccacctgttatgtattagaatatcacatggaaaatgaaaattaattttaataccctcagaaaaggtggaaaacaacttttacaatgtataggaaacagttttgttctcatttttcatataatatattgatattaataatggctattagtcaagggtattataaaaataattattaaactgaaatacttgttgaatgaatagatgcagcaaattacatagttatatatttaatttcaattgaaagtgacaagtgctcagtttggcagcacatatactaaaactggaatgatacagagattagcatggcccttgtgcaaggatgacatgcacatttgtgaagcgaaagtaaatgacattctatcagtgacctgaaaactcaaatgaattgtgacttgcctgtgaagaaatgaaaataaaaattgagggcaataagaatactaccctcaatattgatttttttcactgaaaatatttgatttcagccattaaagatatcttttgacagtaaagtcaataataaatgaaaaaaaaaaaaaaaaaaaaaaa

SEQ ID NO: 104 - DNA, 1678 bp, Human
  PSMD7
aagaaggaggccgcgcgagggctgacgaaccggaagaagaggaactgggcctgaaagggtaccggtgaccgctactgctgccggtgtttgcgtgtggcagggagccaggcctggcgagcggggtgtgtcgcgatgccggagctggcagtgcagaaggtggtggtccaccccctggtgctgctcagtgtggtggatcatttcaaccgaatcggcaaggttggaaaccagaagcgtgttgttggtgtgcttttggggtcatggcaaaagaaagtacttgatgtatcgaacagttttgcagttccttttgatgaagatgacaaagacgattctgtatggtttttagaccatgattatttggaaaacatgtatggaatgtttaagaaagtcaatgccagggaaagaatagttggctggtaccacacaggccctaaactacacaagaatgacattgccatcaacgaactcatgaaaagatactgtcctaattccgtattggtcatcattgatgtgaagccgaaggacctagggctgcctacagaagcgtacatttcagtggaagaagtccatgatgatggaactccaacctcgaaaacatttgaacacgtgaccagtgaaattggagcagaggaagctgaggaagttggagttgaacacttgttacgagatatcaaagacacgacggtgggcactctgtcccagcggatcacaaaccaggtccatggtttgaagggactgaactccaagcttctggatatcaggagctacctggaaaaagtcgccacaggcaagctgcccatcaaccaccagatcatctaccagctgcaggacgtcttcaacctgctgccagatgtcagcctgcaggagttcgtcaaggccttttacctgaagaccaatgaccagatggtggtagtgtacttggcctcgctgatccgttccgtggtcgccctgcacaacctcatcaacaacaagattgccaaccgggatgcagagaagaaagaagggcaggagaaagaagagagcaaaaaggataggaaagaggacaaggagaaagataaagataaggaaaagagtgatgtaaagaaagaggagaaaaaggagaaaaagtaaaacatgtattaaatagcttttttaatttgtaaattaaaatcttacaaactaaatcagtgtgctgctagagggttctttttcacttgacatgcttattagaaagctgacccaacaagagctctctgcctccggtcactcttgctgtggtgctacgtggaagtgaatggagactgatctcaaatctgaactgcagctttcgctgctgtgagttggggatatgatagtcagctcaggcttcagattgtatgagaaaaatgaagagaagtcaacaaatattttggtactcttcattcatttatctctaaaaccaggagttgaattttcctcatcttgaaagactcttggggtctgtttctggtattttacaaaattgctaagtggaatgcatgaattgcattatgttctctggtaacacgtagagttcagacccttctgaactctgttgataataccacaccatgttctggacccatagctctggcatcctcaggggttgtgatccagctccatatattgtttaccttcaaagatacaattaaatggcttgatttttaaaaaaaaaaaaaaaaaa

SEQ ID NO: 105 - DNA, 1916 bp, Human
  NRBF2
atggcgccgtgcgtggcctcggcggtggcgcagggggcgggcccgcggcgcggcgccggaggaggaagtggtgaggttgttgctccttcagcgcctatcgctggctcttggggcgcagagaggggccgcagtctccgcggctgcgtcgagctcccttgcagtcccctccatgttccccggcgccactactccccttcctaaggccgccgcttaccccggggtctatggaagtaatggaaggacccctcaacctggctcatcaacagagcagacgagcagaccgtttattagctgcaggcaaatacgaagaggctatttcttgtcacaaaaaggctgcagcatatctttctgaagccatgaagctgacacagtcagagcaggctcatctttcactggaattgcaaagggatagccatatgaaacagctcctcctcatccaagagagatggaaaagggcccagcgtgaagaaagattgaaagcccagcagaacacagacaaggatgcagctgcccatcttcagacatctcacaaaccctctgcagaggatgcagagggccagagtcccctttctcagaagtacagcccttccacagagaaatgcctgcctgagattcaggggatctttgacagggatccagacacactactttatttacttcagcaaaagagtgagccagcagagccatgtattggaagcaaagccccaaaagatgataaaacaattatagaggagcaggcaaccaaaattgcagatttgaagaggcatgtggaattccttgtggctgagaatgaaagattaaggaaagaaaataaacaactaaaggctgaaaaggccagacttctaaaaggtccaatagaaaaggagctggatgtagatgctgattttgtagaaacgtcagagttatggagcttgccaccacatgcagaaactgctacagcctcctcaacctggcagaagttcgcagcaaatactgggaaagccaaggacattccaatccccaatcttcctcccttggattttccatctccagaacttcctcttatggagctctctgaggatattctgaaaggatttatgaataattaaaatggaaggccacagaaaaggggaaaagaggaaataatacagtaatcgttaatccagcaaaaagaaatgaaaagggaaaaccacatagaagggtaatcccggaaatgcttcatctggtggactgtgggagcagaggcattgccaggacttgggaaacagtcactgtgaaatgcgctgcgtatctcattcactcacttcagctaatgattccgacttggcagacgctaaactcatggaggttcggtttctcctgatacaaaccaaatggctacctggaagaatttctttcaagcaacagttatttttcttatcttcagggttaaaatgtataaaagttatgtgtaattaatctataatgccataaatgataatgcaaaacctaaataatatggtggccggaggggctgccttatatttgaaacatgctttctatcatgcattgactgtatgcattttgttaatgcacattctgtttgtttaaggtgtgtaagatacacacccttctagatgaaactatatgtgccacactttgcactactcataatgataacctcaagactatcagaagaaatatttaaatttccattttatgaagaaaggaaccaaattattatgctttttaaaacaaattaccagtttacataattaatcagggtgcattttaagttctaacttcgtttattgtataatgcatcatttgaaaataccaaggaggaaataccctttgtttttaatgatgcaagagtggacgtaatgctagttggcagtattttattgtaagaaatcaataaagtaattgtgttttataaaaaaaaaaaaaaaaaaaaa

SEQ ID NO: 106 - DNA, 6401 bp, Human
  ROCK2
caaggcggccggcggcgaccatggcagcgggccggcggcggccgtagtggcccaggcctgggcttcagcctcccggggccccagagggcggggcggtccgggccgcggcggtggcggcgccacttccctgctcccgcccgaggactcctgcgggcactcgctgaggaccagcggaccggcggcgcgaatctgactgaggggcggggacgccgtctgttccccgccgctcccggcagggccgggccgggctgggccgggctgggccgggcgggcccctgggagcagcccccaggcgggggaccgccttggagacccgaagccggagctagaggcaggcggtgggcccgggtggagtcccggccggagctggtggttcgggggcggtgctaggccccgaggctgcgggacctgagcgcgaggagcctgagtgcgggtccagcggtggcggcatgagccggcccccgccgacggggaaaatgcccggcgcccccgagaccgcgccgggggacggggcaggcgcgagccgccagaggaagctggaggcgctgatccgagaccctcgctcccccatcaacgtggagagcttgctggatggcttaaattccttggtccttgatttagattttcctgctttgaggaaaaacaagaacatagataatttcttaaatagatatgagaaaattgtgaaaaaaatcagaggtctacagatgaaggcagaagactatgatgttgtaaaagttattggaagaggtgcttttggtgaagtgcagttggttcgtcacaaggcatcgcagaaggtttatgctatgaagcttcttagtaagtttgaaatgataaaaagatcagattctgcctttttttgggaagaaagagatattatggcctttgccaatagcccctgggtggttcagcttttttatgcctttcaagatgataggtatctgtacatggtaatggagtacatgcctggtggagaccttgtaaaccttatgagtaattatgatgtgcctgaaaaatgggccaaattttacactgctgaagttgttcttgctctggatgcaatacactccatgggtttaatacacagagatgtgaagcctgacaacatgctcttggataaacatggacatctaaaattagcagattttggcacgtgtatgaagatggatgaaacaggcatggtacattgtgatacagcagttggaacaccggattatatatcacctgaggttctgaaatcacaagggggtgatggtttctatgggcgagaatgtgattggtggtctgtaggtgttttcctttatgagatgctagtgggggatactccattttatgcggattcacttgtaggaacatatagcaaaattatggatcataagaattcactgtgtttccctgaagatgcagaaatttccaaacatgcaaagaatctcatctgtgctttcttaacagatagggaggtacgacttgggagaaatggggtggaagaaatcagacagcatcctttctttaagaatgatcagtggcattgggataacataagagaaacggcagctcctgtagtacctgaactcagcagtgacatagacagcagcaatttcgatgacattgaagatgacaaaggagatgtagaaaccttcccaattcctaaagcttttgttggaaatcagctgcctttcatcggatttacctactatagagaaaatttattattaagtgactctccatcttgtagagaaactgattccatacaatcaaggaaaaatgaagaaagtcaagagattcagaaaaaactgtatacattagaagaacatcttagcaatgagatgcaagccaaagaggaactggaacagaagtgcaaatctgttaatactcgcctagaaaaaacagcaaaggagctagaagaggagattaccttacggaaaagtgtggaatcagcattaagacagttagaaagagaaaaggcgcttcttcagcacaaaaatgcagaatatcagaggaaagctgatcatgaagcagacaaaaaacgaaatttggaaaatgatgttaacagcttaaaagatcaacttgaagatttgaaaaaaagaaatcaaaactctcaaatatccactgagaaagtgaatcaactccagagacaactggatgaaaccaatgctttactgcgaacagagtctgatactgcagcccggttaaggaaaacccaggcagaaagttcaaaacagattcagcagctggaatctaacaatagagatctacaagataaaaactgcctgctggagactgccaagttaaaacttgaaaaggaatttatcaatcttcagtcagctctagaatctgaaaggagggatcgaacccatggatcagagataattaatgatttacaaggtagaatatgtggcctagaagaagatttaaagaacggcaaaatcttactagcgaaagtagaactggagaagagacaacttcaggagagatttactgatttggaaaaggaaaaaagcaacatggaaatagatatgacataccaactaaaagttatacagcagagcctagaacaagaagaagctgaacataaggccacaaaggcacgactagcagataaaaataagatctatgagtccatcgaagaagccaaatcagaagccatgaaagaaatggagaagaagctcttggaggaaagaactttaaaacagaaagtggagaacctattgctagaagctgagaaaagatgttctctattagactgtgacctcaaacagtcacagcagaaaataaatgagctccttaaacagaaagatgtgctaaatgaggatgttagaaacctgacattaaaaatagagcaagaaactcagaagcgctgccttacacaaaatgacctgaagatgcaaacacaacaggttaacacactaaaaatgtcagaaaagcagttaaagcaagaaaataaccatctcatggaaatgaaaatgaacttggaaaaacaaaatgctgaacttcgaaaagaacgtcaggatgcagatgggcaaatgaaagagctccaggatcagctcgaagcagaacagtatttctcaaccctttataaaacacaagttagggagcttaaagaagaatgtgaagaaaagaccaaacttggtaaagaattgcagcagaagaaacaggaattacaggatgaacgggactctttggctgcccaactggagatcaccttgaccaaagcagattctgagcaactggctcgttcaattgctgaagaacaatattctgatttggaaaaagagaagatcatgaaagagctggagatcaaagagatgatggctagacacaaacaggaacttacggaaaaagatgctacaattgcttctcttgaggaaactaataggacactaactagtgatgttgccaatcttgcaaatgagaaagaagaattaaataacaaattgaaagatgttcaagagcaactgtcaagattgaaagatgaagaaataagcgcagcagctattaaagcacagtttgagaagcagctattaacagaaagaacactcaaaactcaagctgtgaataagttggctgagatcatgaatcgaaaagaacctgtcaagcgtggtaatgacacagatgtgcggagaaaagagaaggagaatagaaagctacatatggagcttaaatctgaacgtgagaaattgacccagcagatgatcaagtatcagaaagaactgaatgaaatgcaggcacaaatagctgaagagagccagattcgaattgaactgcagatgacattggacagtaaagacagtgacattgagcagctgcggtcacaactccaagccttgcatattggtctggatagttccagtataggcagtggaccaggggatgctgaggcagatgatgggtttccagaatcaagattagaaggatggctttcattgcctgtacgaaacaacactaagaaatttggatgggttaaaaagtatgtgattgtaagcagtaagaagattcttttctatgacagtgaacaagataaagaacaatccaatccttacatggttttagatatagacaagttatttcatgtccgaccagttacacagacagatgtgtatagagcagatgctaaagaaattccaaggatattccagattctgtatgccaatgaaggagaaagtaagaaggaacaagaatttccagtggagccagttggagaaaaatctaattatatttgccacaagggacatgagtttattcctactctttatcatttcccaaccaactgtgaggcttgtatgaagcccctgtggcacatgtttaagcctcctcctgctttggagtgccgccgttgccatattaagtgtcataaagatcatatggacaaaaaggaggagattatagcaccttgcaaagtatattatgatatttcaacggcaaagaatctgttattactagcaaattctacagaagagcagcagaagtgggttagtcggttggtgaaaaagatacctaaaaagcccccagctccagacccttttgcccgatcatctcctagaacttcaatgaagatacagcaaaaccagtctattagacggccaagtcgacagcttgccccaaacaaacctagctaactgccttctatgaaagcagtcattattcaaggtgatcgtattcttccagtgaaaacaagactgaaatatgatggcccaaaatttattaaaaagctatattttcctgagagactgatacatacactcatacatatatgtgttccccttttccctgtaatataaattacaaatctgggctcctttgaagcaacaggttgaaccaacaatgattggttgatagactaaggatatatgcaactcttccagacttttccataaagctctctcggcagtcgctcacactacaatgcacacaaggattgagaagagttaaaggctaaagaaaacatcttttctagcttcaacagagaggtttcaccagcacatttaccagaagaatctgggaatggattccactacagtgatattgactgcatctttaagaagtgaccattatactgtgtatatatatataaacacacacacatatatatatatatatatagtactctaatactgcaagaaggttttttaaacttcccactttattttttatacacattaatcagatatcattacttgctgcagttgcaactatgcacttgtataaagccataatgttggagtttatatcactcattcctgtgtacctgatggaagttgcatgttcatgtttaagcagttactgtaacaagaagtttaaagttaattatatcagtttcctaatgcttcatgataggcaactttacccattttgaatgccttaatttaatttttttcaaagtctcagccctgtctgtattaaaaaacaaaaaaagcgtttaccagctcttaggatgtaaactagctttgtggaagataaatcgtgcactatttttacacataaatagttatatcaatgtcagcctattttgattaacaaatgtttttaaagtattattggttatagaaacaataatggatggtgttggaactaatatatccttgatgtctgtctattattcattcaactctttttacagacctcagtattagtctgtgactacaaaatattttatttgctttaaatttgctggctaccctagatgtgtttttattcctggtaaagacatttgtgattacattttcacacttaagattcaaaatttttcccaaatataaagaaaactaagacagactgtagatgcattttaaatatttaaatatgatcctcagacatgcagctgtgtgtggcagtattttagtaccgggttaagaaaactggcaactgggaagaagtggcctcaaaggcacttaatttgatttttattttttaaatgctgtcaaagttacagtttacgcaggacattcttgccgtattctcatgatcccagataagtgtgtgttttatactgcaacaatatgcagcaatggtaagcgtaaagttttttttttgtttttgtttttttttatattatgaagtcttttaacagtctctctttatataaatacacagagtttggtatgatatttaaatacatcatctggccaggcatggtggcttacgcctgtaatcctagcactttgggaggccaagacgggcggatcacctgaggtgaggagttcaagaccagcctgcccaacatagtgaaactccgtctctaccaatatacaaaaattagccgggcatgatggtggtggcctgtaatcccagctacttgggaggctgagacaggagaatcgcttgaacccaggagacggtggttgcagtgagcgaagatcgagccactgcactccagcctgggcagctgaacaagactccgtctc

SEQ ID NO: 107 - DNA, 7086 bp, Human
  MAML3
agcagcggcggcagcggcagcccagccgagcgttaggtgctgctctctgcgcggcgttttgcaaaggacttcaccgatctacttttgcagtcgcctcggactgtccatgtgtttacttcccccagcccgaggattcgatatctaggttcctgtgaaatgcaactgagcagccaaagtactttgagaacacggggcggcataaacaccaaaacttttttgtggaaggaaaatgcaataagcaagcttgccgttttccgatgcggtgtggagtgagtgtgtgtcgcgcgtgtccgcactggaggcatatgcttgtgtgtgtacatggggtgtgtttttcggtatgtagggagaaaatgcttgccaaccaccggaaatctcctggaatttattagaaaataatggattataaaaagaaggcaagcaaggagcggatctccccttgagttgcaacccgatttgctgctggctcagtttgttgtgattctttttgttgataggtgtctgatggtattccgataacgttccccccttttcttccccttgagcttttacagtttaaaaaaaggaaacaaaaaccaccccaaaatctccccccccgtttttttcgccccgtcgggatcgccgtttccatccatgtgcttgcgtctcccccgcgttccacttaaactattttaatccttggacccaaggaggaggctgataggggggtggataaaaaaagttcttccaaaatagtgtgcccggggagcaggatgggggatttcgcagcccccgctgctgccgcgaatggcagtagtatttgcatcaacagtagcctgaacagcagcctcggcggggccgggatcggtgtgaataatactcccaatagtactcccgctgctccgagtagcaatcacccggcagccggtggatgcggcggctccgggggccccggcggcggttcggcggccgttcccaagcacagcaccgtggtggagcggctccgccagcgcatcgagggctgccgtcggcaccacgtcaactgcgagaacaggtaccagcaggctcaggtggagcagctggagctggagcgccgggacaccgtgagcctctaccagcggaccctggagcagagggccaagaaatcgggcgccggcaccggcaaacagcagcacccgagcaaaccccagcaagatgcggaggctgcctcggcggagcagaggaaccacacgctgatcatgctacaagagactgtgaaaaggaagttggaaggagctcgatcaccacttaatggagaccagcagaatggtgcttgtgatgggaatttttctccgactagcaaacgaattcgaaaggacatttctgcggggatggaagccatcaacaatttgcccagtaacatgccactgccttcagcttctcctcttcaccaacttgacctgaaaccttctttgcccttgcagaacagtggaactcacactcctgggcttctagaagatctaagtaagaatggtaggctccctgagattaaacttcctgtcaacggttgcagtgacctggaggatagcttcaccatcttgcagagcaaagacctcaaacaagaacctctcgatgaccctacttgcatagacacatcagaaacatctctttcaaatcagaacaagctgttctcagacattaatctgaatgatcaggagtggcaagaattaatagatgaattggccaacacggttcctgaggatgacatacaggacctgttcaacgaagactttgaagagaagaaggagccagaattctcgcagccagcaactgagacccctctctcccaggagagtgcgagcgtgaagagcgacccctctcactctcccttcgcacatgtctccatgggatctccccaggcgaggccttcttcttctggtcctcccttttctactgtctccacggccactagtttaccttctgttgccagcactcccgcagctccaaaccctgcaagctcaccagcaaactgtgctgtccagtcccctcaaactccaaaccaagcccacactccaggccaagctccacctcggcctggaaatggttatctcctgaatccggcagcagtgacagtggccggttcagcgtcagggcctgtggctgtgcccagctctgacatgtctccagcagaacagctcaaacagatggctgcacagcagcaacaaagggccaaactcatgcagcagaaacagcaacagcaacagcagcagcagcagcagcagcagcagcagcagcagcagcagcagcaacagcactcaaatcagacttcaaattggtctcccttaggacctccctctagtccatatggagcagcttttactgcagaaaaaccaaatagcccaatgatgtacccccaagcctttaacaaccaaaaccctatagtgcctccaatggcaaacaacctgcagaagacaacaatgaataactacctccctcagaatcacatgaatatgatcaatcagcagccaaataacttgggtacaaactccttaaacaaacagcacaatattctgacttatggcaacactaaacccctgacccacttcaatgcagacctgagtcagaggatgacaccaccagtggccaaccccaacaaaaaccccttgatgccgtatatccagcagcagcaacagcagcagcaacagcaacagcagcagcagcagcagcagcagccgccacctccacagctccaggcccccagggcacacctgagcgaagaccagaaacgcctgcttctcatgaagcagaaaggagtgatgaatcagcccatggcttacgctgcacttccatcccacggtcaggagcagcatccagttggacttccccgaaccacaggccccatgcagtcctccgtgcccccaggctcaggtggcatggtctcaggagccagtcccgcaggccccggcttcctgggcagccagccccaagcagccatcatgaagcagatgctcattgatcagcgggcccagttgatagagcagcagaagcaacagttcctgcgggagcaaaggcagcagcagcagcagcagcagcagattttggcggaacagcagttgcagcaatcacatctaccccggcagcacctccagccacagcggaatccatacccagtgcagcaggtcaatcagtttcaaggttctccccaggatatagcagccgtaagaagccaagcagccctccagagcatgcgaacgtcacggctgatggcacagaacgcaggcatgatgggaataggaccctcccagaaccctgggacgatggccaccgcagctgcgcagtcggagatgggactggccccttatagcaccacgcctaccagccaaccaggaatgtacaatatgagcacaggcatgacccaaatgttgcagcatccaaaccaaagtggcatgagcatcacacataaccaagcccagggaccgaggcaacctgcctctgggcagggggttggaatggtgagtggctttggtcagagcatgctggtgaactcagccattacccagcaacatccacagatgaaagggccagtaggccaggccttgcctaggccccaagcccctccaaggctgcagagccttatgggaacagtccagcaaggagcacaaagctggcaacagaggagcttgcagggcatgcctgggaggactagtggagaattgggaccattcaacaatggcgccagctaccctcttcaagctgggcagccgagactgaccaagcagcacttcccacagggactgagccagtcagtcgtggatgctaacacgggcacagtgaggaccctcaacccagctgccatgggtcggcagatgatgccatcgctcccggggcagcaaggcaccagccaggcgaggccaatggtcatgtctggcctgagccagggagtcccaggcatgccagcgttcagccagcccccagcacagcagcagatacccagtggcagctttgctccaagcagccagagccaagcctatgagcggaatgcccctcaggacgtgtcatacaattacagtggcgacggagctgggggttccttccctggcctcccggacggtgcagaccttgtggactccatcatcaaaggcgggccaggggacgagtggatgcaggagcttgatgaattgtttggtaacccctaatcaagagaggccccaagatccacaactcgagtggttaaagcttaaaaagtgaaaaagaaacaggatgttgacccatccttgttttttgtttttttgacccacgtaaactgagcaaaactgcagctggctgacaatggaagatccaggtgccaatccacagccccaccaggcctcatttcacctgattttcacacagcaatcgagatgagacgccatgcagatcccggctgcgagagagggagacacccggaggagcaggtgggaagatgaagccggccagagcccctctgcccagcatgccctgtgatcgcctggcccagcaggagctgcttcagccgagagggactattacccaagagaggtatcctcagcccctcctgccccaggtcgggagacagcagctttggagacacaaaagagacagagcctcagccagggagagtgagtcccccagaagaggctgggtggttgcacaggccaggtgcacaggttggaaatgcactgaactctgggtgccgagagatgtaaggctttgagacatgctactgaatttggagggcaggcacgaagaacagtgagattgtcaaaaggagacaaccacagatcctacaggactgtctgtctcctgccccatgatgaccctcaggaattgcaaaggctctgctgtcacaaggagagcaggctgagtttggagcagggtccatccggcagtcctgggacggcttccctctgctggtgcccctggtggcagtccctccaggtggggctggagcctgctggcgcccaatacaaaacccatacatccaggtgggtcacatctacttctggcggccgcagggcagggaaacccctactggaccctgtgtgtctgccagcctggagcctttgtctccagccctgcctttattcctccttgcctccacaccagcctccccttgcttctccttacagactatccaagaagtgaagcttatgtctttagggagccttgggcagagtccacataaatgcaggaagaacttagacaatgcctgaaatgcaaaggcgacactggagtcttctttctctaacgtgtagcgttgaatgaatatctgcctggaaccaagagggctgctctgatgtttgggagtcggttttttgtgagccacatctgatatttctgatatccccaggaaggagtggcctggaggtcactggttcaggctccctttgggcgaaatcctgggagtgatgctctaaaaatccacctttcccatcatccctactcatcagaaagacaaatataaaatcccagagaggtggaggagctaaaaaagcaattgctccaccttacaaatttggatagaaaggagatgtagtttatttcatatgggcaaagtagtcctcttccaaagtcctgtacagttgttctctgcaattgacgcacatctgccctaagcgaaatctgtcagaaggaatcaacaaggctccttgcctcccctcccaatcccccttttggaggacttgtggcttcggtgtcgtcctaagtgagagtggcgtgtgcttttttcctgtcccctcctccctccgtgtcctagacgctggctgccttctgtgcactcccaggcagatcactacggaagagtcggagcctgtggggttggactggccacactcagtcctgagaaggcgagttgccatggaaagctgggggcagaggtgtttttggagaggaggcggcaggcaaacattgcctttgacttgctctccgcgtacccggggttgtagagctgctcaggaaggggcaggatgtaaggccagaggtgcctggtgggtgagaagcccaggcaggggctgggcgccctctccgaagaggtggcagcagggtgaccctgaactccccaaatggggagtgatgccactggggaaactgagtggatcaaagagatgaaaccaaaaaaaagcaaacaaacaaatgagaagacacaaaacataattaccttttcctgaaaggtacaggaaataaatatataagcaatgatgagaaactggaggtggctaatggaagtgagacagacaggggtggggggctccattatcttttaaaagcttcctccaaatgctcagtactgggaccaactaataggtagattttaatatggtggttttgttttggttttgtttttactacggtgctgatgtatatgtaatgtctaaaaaaagttatttgtacataagtttttacaatactgcagatatcactgggtctactatctgtaaaaaatatacatataaatatatatatactgtttgtttaaaatagagtatttttatttcattccttaactcatcatcacagcagtggtattgcacttcagatgacatctaattactaatttgtactgtatgacctctggcaacttgctccattttattcagatttttctagttttctgtttttactttgtacattgagcattgcttatttccttttaagaaatgtacagaacgctgaaatgtagaaatgaagtgatgttgacataccacttttaaagaaaacaaaaacaaaaataaaagattatctgaatcaatccaaagtatagtttattttaagatcctcactggagctccaatcttaattaagcagacatattattcctgggttttaattaactgcagttcttttctcaaaattttgatatcattctttaaacatttatttaatgggagagatcaatcattcccagcctttgcattcaactgcacaactgatgatactttctgaatttactgccgcactctgaaggatgtggcaaagggaagggaggaaagtcaactttgcatggaacatagtgcaatccatttgtagattcagtaccataacaattccatttccaactagttcatctggaggtagggaggctccactggaaaaataaatatttttgtcaaa

SEQ ID NO: 108 - DNA, 1311 bp, Human
  FAM50A
ccgccgctgccgctgccgctgtcgctgtcgccgccgccgccgcccgccgccgccgccgccgccgccgccgctgccatggctcaatacaagggcgccgcgagcgaggccggccgcgccatgcacctgatgaagaagcgggagaagcagcgcgagcagatggagcagatgaagcagcgcatcgcggaggagaacatcatgaaatccaacattgacaagaagttctctgcgcactacgacgcggtggaggcagagctcaagtccagcaccgtgggtctcgtgaccctgaatgacatgaaggccaagcaggaggctctggtgaaggagcgggagaagcagctggccaagaaggagcagtccaaggagctgcagatgaagctggagaagcttcgagagaaggagcgtaagaaggaagccaagcggaagatctccagcctgtccttcaccctggaggaggaagaagagggaggcgaggaggaagaggaggcggccatgtatgaggaggagatggaaagggaagagatcaccacgaagaagagaaaactggggaagaacccagacgttgacacaagcttcttgcctgatcgagaccgtgaggaggaggagaatcggcttcgggaagagctgcggcaggagtgggaagccaagcaggagaagatcaagagtgaggagatcgagatcaccttcagctactgggatggctctgggcaccggcggacagtcaagatgagaaagggcaacaccatgcagcagttcctgcagaaggcgctcgagatccttcggaaagacttcagtgagctgaggtccgcaggggtggagcagctcatgtacatcaaggaggacttgatcatccctcaccatcacagcttctacgacttcatcgtcaccaaggcacgggggaagagtggaccactcttcaactttgatgttcatgacgatgtgcggttgctcagtgacgccactgtggagaaggatgagtcccatgcaggcaaggtggtgctgaggagctggtacgagaagaacaagcacatctttcccgccagccgctgggaaccctacgaccctgaaaagaagtgggacaagtacacgatccgctgagcatccaggaggctgcgcggccccggctcctcagctccctcagtgtgccccgtggtgtcaccgggactccaggcacccgctcccctgcgaccatgccaggcacgctgggaggaggacggcagctgctcgtgtcctgcccctgccacatcagtgactgctttattcttttccaataaagaagtgcacgtgtcagagctggagcgcctgcattgtgag

SEQ ID NO: 109 - DNA, 3288 bp, Human
  STK39
gctccctcccctcctagctggcttcggcggggacggcggcggcggcggcgggcggggagggcgtgcgccggccgagaggtgtcggcggcgaggcaaaggaagtttcaagtggaaggtcgtccgtcggccggcgcgtcctcctgctctcctccgcagcatcatggcggagccgagcggctcgcccgtgcacgtccagcttccccagcaggcggccccggtgacagcggcggcggcggcggccccggcggccgcgacagcagcgccggccccggcagctcccgcggccccggccccggccccggccccggcggcacaggctgtcggctggcccatctgcagggacgcgtacgagctgcaggaggttatcggcagtggagctactgctgtggttcaggcagccctatgcaaacccaggcaagaacgtgtagcaataaaacggatcaacttggaaaaatgccagaccagtatggatgaactattaaaagaaattcaagccatgagtcagtgcagccatcccaacgtagtgacctattacacctcttttgtggtcaaagatgaactttggctggtcatgaaattactaagtggaggttcaatgttggatatcataaaatacattgtcaaccgaggagaacacaagaatggagttctggaagaggcaataatagcaacaattcttaaagaggttttggaaggcttagactatctacacagaaacggtcagattcacagggatttgaaagctggtaatattcttctgggtgaggatggttcagtacaaatagcagattttggggtaagtgcgttcctagcaacagggggtgatgttacccgaaataaagtaagaaaaacattcgttggcaccccatgttggatggctcctgaagtcatggaacaggtgagaggctatgacttcaaggctgacatgtggagttttggaataactgccattgaattagcaacaggagcagcgccttatcacaaatatcctcccatgaaagtgttaatgttgactttgcaaaatgatccacccactttggaaacaggggtagaggataaagaaatgatgaaaaagtacggcaagtcctttagaaaattactttcactgtgtcttcagaaagatccttccaaaaggcccacagcagcagaacttttaaaatgcaaattcttccagaaagccaagaacagagagtacctgattgagaagctgcttacaagaacaccagacatagcccaaagagccaaaaaggtaagaagagttcctgggtcaagtggtcaccttcataaaaccgaagacggggactgggagtggagtgacgacgagatggatgagaagagcgaagaagggaaagcagctttttctcaggaaaagtcacgaagagtaaaagaagaaaatccagagattgcagtgagtgccagcaccatccccgaacaaatacagtccctctctgtgcacgactctcagggcccacccaatgctaatgaagactacagagaagcttcttcttgtgccgtgaacctcgttttgagattaagaaactccagaaaggaacttaatgacatacgatttgagtttactccaggaagagatacagcagatggtgtatctcaggagctcttctctgctggcttggtggatggtcacgatgtagttatagtggctgctaatttacagaagattgtagatgatcccaaagctttaaaaacattgacatttaagttggcttctggctgtgatgggtcggagattcctgatgaagtgaagctgattgggtttgctcagttgagtgtcagctgatgtatgtcccttgatgtcaccctgatctgtcatgccccaccgccacccctactcccttcaaccctccctctttctgcccatttcctcccaccccctcactcccatttcctagcaaaatcagaagattgtgaagaggccggcttcaacaaaatgggataaaaaaataattttttaaaacttacaacactccgagttctgctttattctctagcaatccacagtacaagaacaagcaaatgccacagctgcacgactgttgctcatttttccaaaagctatttaatattcttagcaatcaatttggatatcccttaagtgaaaagaatctgaaatacactcaggtggtcttatttattggcaacaaaaggaattttctatccagaagcctatttctcctttcattgttgttatttctgttataatactttaattgtacatctgacaatactgcctcttttatgttgtatttagaaattaatatacttataaaattaagatttattagccaaacttgaattctagttttaaaactgactgtgaattttatttttcatatatttatgcattacacaccttagctataagaaaaaaagggttttgattatatgcttcttgcagttaatctcgttatttaaacaaaaagttttgggtctgtctttggagtatttgtaacttctaaattttgaaatgactgaattaggaatttggatgcttattcttttagtctgtttgcctaaaaaccaatttacaatctgactgtctcttgggagagggaggtgccttgcaaactttcacattaagaatgtgcctgaggctgctttactctggaatagtctcagatctaaaatttcctctatataaggtggcatatgttaagttttgcttcattggaccgtttagaatgctatgtaaaatgttgccattctgttagattgctaactatatacccatctctgatttggctctccttaagtgataggatttgttattctaaaggtgataaacttgaaaatatcagaatctgagttttacttgaaattttgcagaatacccaggtggagtgaaaattggaagggttttgtgcaatgactaaaaggtaaaacgctgttaaggttcaagaatcaatactttcaacccaagtagccctctgcttgactgtatattatggaactagtaaaccttaggattttgaaaattggagtctaatctttcaaggaggtgggctcccaggatggtaccattgctctttcctagctaaccctagatatggcagctctttaatgtacttcaaaaagcaaatatatattactaaggaaaaaaagttatttataattgccttgtcataattgttaaggtgttctagagccatttgcatacaatttaatgtaatttcattccattctattgtttacacaacgattactcgaagatgactgcaaaggtaaaaggaaaataaaagtgtattgcacaatgagaaaaaaaaaaaaaaa

SEQ ID NO: 110 - DNA, 5302 bp, Human
  TRMT5
atccacccgcgacccacatccgatcggtaccggagcgggaggtgaggggtcggctcgcggatccagctgcagagcgacgtggggaattggaatggtgctttggatcttatggaggccatttggattctcaggaagatttctgaaactggaaagccatagcataactgaatcaaaatcgttgattccagtagcttggacatccctgacacagatgcttttggaagcacctggtattttcttattgggtcaaagaaaaagattctcaaccatgccagaaacagaaacacatgagagagagactgaattgttttcaccaccttctgatgtccgaggcatgacaaaacttgatagaacagcttttaaaaagacagtcaacattccagtgcttaaagtgaggaaagaaatagtcagtaaattgatgcgatccctaaaaagggcagcattgcagcgcccaggcataagacgtgtgattgaagatccggaagataaagaaagtagactaatcatgttggatccctataaaatatttactcatgattcctttgagaaagcagaactcagtgttttagagcagcttaatgtcagtccacagatctctaaatacaatttggaactaacatatgaacactttaagtcagaagaaatcttgagagctgtgcttcctgaaggtcaagatgtaacttcagggtttagcaggattggacatattgcacacctaaaccttcgagatcatcagctgtctttcaaacatttaattggccaggttatgattgacaaaaatccaggaatcacctcagcagtaaataaaataaataatattgacaatatgtaccgaaatttccaaatggaagtgctatctggagagcagaacatgatgacaaaggttcgagaaaacaactacacctatgaatttgatttttcaaaagtctattggaatcctcgtctgtctacagaacacagccgtatcacagaacttctcaaacctggggatgtcctatttgatgtttttgctggggttgggccctttgccattccagtagcaaagaaaaactgcactgtatttgccaatgatctcaatcctgaatctcataaatggctgttgtacaactgtaaattaaataaagtggaccaaaaggtgaaagtcttcaacttggatgggaaagacttcctccaaggaccagtcaaagaagagttaatgcagctgctgggtctgtcaaaagaaagaaaaccctctgtgcacgttgtcatgaacttgccagcaaaagctatagagtttcttagtgctttcaagtggcttttagatgggcagccatgcagcagtgagttccttcccatagtgcattgttatagcttttccaaagatgctaaccctgctgaggatgttcggcaaagggctggagctgtgttaggcatttctctggaggcatgcagttcagttcacctggtaagaaatgtggccccaaacaaggaaatgctgtgcatcacgtttcagattcctgcctctgtcctctacaagaaccagaccagaaatccagagaatcatgaagatccacctcttaaaaggcagaggacggctgaagccttttcagacgaaaaaacacaaattgtttcaaacacttaattggaaatgttttctccatctccctaccagacttacatgtagtgaaatagaatttgtattatttaataaaattttagggtttggtttttactattgaacccttgtactttgccttattttacaaattgaggattaccaattaaactttaactgaactaaggctaccaaatacattccctgttatctaaattataacatacaattattttataacaaaatatatctaatttttattggataaatatgaataaatattttctctcagggaaaataatttttgaaagtagggtgattgagtactaactaggaaggtattaacaccactttgtagttgtcctttacgtaactactcctttactgccaattaactatcaccataaaagtaataaaaaatgaaattatttagaacggggcaggcaaactacatcctgcaggccaaatctgtcccaccacctgttttcatatggcctgtggcctaataatgttcttacgttttccattggttgaaaaataatcaaaagaacattttgtgacgtgaaaattttatgacatctattatgtatcagttttaaaaattagaattgtatgaaattaagagtttcagagttcataaagtttgattggaacataccatgctcatttgtttacatatcatctgcagctgttttttgtttttaatatggaacgcttcacgaatttgcatgtcatccttgcgcagggaccattctgatcttctctgtaccattccagttttttagtatatgtgctgctgaagtgaggactgcagctgctttcttgaacaatagcagagttgagtggttgcaacacacactgaatgtgactgtcatcacttcacactgctgtttgacacatcacaaatcactgatgtggttgtaacgacagcattttgagtgccatgtatatcacatgaacccacattttattttttattaccagagcatatctattatagcaaaacaagaaaagtggactttgttgttatttttaaagtacagtagggtgtgaattattttgatgttgaattagacgacaaagcatctatatagctaagctaaaagaataaccattgacattaccagacaaaccactcatcacagtattcccaactcacaggcaagcaactgttagaaaaattagaaaatttaaaatggaaataacaaagcagaatttcttcacaaaatgaaaatgaggctgcaacaacagtaagtctctaagtcaatcatttgttagccaagcaaagccatttattgatggtgtgaattaattatgtttggatgcagcagctgaatatatccagagaaaataaacttaagattactggcctttggcaagaacagttgcttaaagagttaaggacattgaaagcgacataaatagtcactttaaaaaggaaatgattctggatggttctttgactctatttttatttttacttagagacagggtcttgctctgttgcccaggctggagtgtagagacacagttacacctcaatgtaaccttgaactcctaggcttgagatcttcccatctcggcttcccaatgtgtgaaggttacaggtgtgagcccttatatgtggccctcgtgaatggtttagcactatccccttggtggtgtccttaagataatgagttatgagatcttgttgtttcaaagtatgtggcactcgccccccacactctcttgctcctgccttcgccatgtgaagtgccttctcctattttgccttctaccatgagtaaaagcttcctgaggcttccccagaagcagatgccagtgctatgcttcctatagcctggagaactgtgagccaattatacctcttttcttataaattacccagtatcaagtatttctttatagcaatgcaagaatggcctaaaacacaaggcaaaacaactttgatatggtacagtcattttgacaatcgatatttgaatcacaatatttgatgacaatatccttacacatttgtcatactatcaaagagaaagaaacaagatttccattcccacaaattttagtgagtatattttctgagttcagcatttttagggacctaggtgcaagtgcaaaggaaatttccctgtttcaaaatctatttaactgcaattgaggtgattcaacctaattttcagtaagaagtgattaaaataatgacatgctaaaaggcaaatttcaagggaagaaatgtaaaagaattttacaaatgctttccaagtgatgaatatgctcagttaatttcatatgctcctggattgatagcagtatttggcaatacctatctgtatgagaagacatttttaaagatgaaatgtgtaaaatcttattaccattagtattaatggttaatgatggttaatgataaccattaataggcaatcatttacaactgattttgatcacagggaacacttacttagaaccctgattagaggcaatgttattctcaccaaaaaaggcattacaaaaaattgggctatattttgaattttgtcaattaaaaaagcgtgggagcagtgtgaaggagaagaggcaagaacgacccctggaccgaccaaagcccgcgcgctgctgcgtcccacacccggtgcccacatcccgccgccgccgccgccgccatgcccaagagaaagactgaaggggatgctaaaggagataaagccaaggtgaaggatgaatcacagagaagatctgcgaggttgtctgctaaacctgctcctccaaagccagagcccaagcctaaaaaggcccctgcaaagaagggagagaaggtacccaaagggaaaaagagaaaagctgatgctggcaaggagcgggaaggtgctggagatcccaagtgaagtgtgtgcattttttataactgtacttctggtgactgtacagtttgaaatattctttatcaagttttataaaaatgcagaattttgttttactttttttaagctatgttgttagcacacagaacacttcattgttgtttttgggggaaggggtatgtgtcactaatagaatatctctgaagctggattgatacggggaaaacatctttcccttctagttttgagagacttcctcttggctcccaggaggagggatttcctgactttgacacacatggccaccttggcacaaaagccttgtggtatggaaaaacaaattcgtttttatgtcttcttttccctttccatctttcagcatagacttaatccccttaagcccagacatctgttgggacctgacccccggtcattggttaccagtgtgtctggcaatctggactttccagtgatgccactgagatggcacctgtcaaaagagcagtggttccatttctagattatggatcttcggataaattctgccattttcatttcacttcctgaaagtcagggttggcttgtgaaaagttgttaaacaacatgctaaatgtgaaatgttaaccctctaaactttccctgttcagagcatcagatgaggacttcattgggttttatagcggctgatttttggtagtccattgaagaagagagtttgaaagttgtatactgttaatgactgtctgcccatgtcctgcctgaaataccatgattgtttatggaaagtatctttaataaagctggatacagtttgaaagaaaaaaaaaaaaaaaaaaaaaaa

SEQ ID NO: 111 - DNA, 1834 bp, Human
  RPIA
cgggggcgggacttcagcggaggccggagcgaggcgtcgggatgcagcgccccgggcccttcagcaccctctacgggcgggtcttggccccgctgcccgggagggccgggggcgcggcctccggcggaggagggaacagctgggacctcccgggttcccacgtgcggctgccggggcgtgcacagtctgggacccgtggcggtgctggcaacacaagcaccagctgcggggactccaacagcatctgcccggccccctccacgatgtccaaggccgaggaggccaagaagctggcgggccgcgcggctgtggagaaccacgtgaggaataaccaagtgctgggaattggaagtggttctacaattgtccatgctgtgcagcgaatagctgaaagggtgaagcaagagaatctgaacctcgtctgtattcccacttccttccaggcccgccagctcatcctgcagtatggcttgaccctcagtgatctggatcgacacccagagatcgaccttgccatcgatggtgctgatgaagtagatgctgatctcaatctcatcaagggtggcggaggctgcctgacccaggagaagattgtggctggctatgctagtcgcttcatcgtgatcgctgatttcaggaaagattcgaagaatctcggggatcagtggcacaagggaatccccatcgaggtcatcccaatggcctatgtcccagtgagccgagctgtgagccagaagtttgggggcgtggttgaacttcgaatggctgtcaacaaggctggtcctgtggtgacagataatgggaattttatcttggactggaagtttgaccgggtacacaaatggagtgaagtgaatacagctatcaaaatgatcccaggtgtggtggacacaggcctattcatcaacatggctgagagagtctactttgggatgcaggatggctcagtgaacatgagggagaagcctttctgttgaccctgcaaggagcagagtgtgttcaccttgagtctccagcccacagccaaggtggacgtacctctccaggagcctttgccttaatgtatctctgcctggacaacttgtggtggggggtggggggaagagtgggagggggagttaaatccagtcttatgaagtattgttattaaatgtctttttaaaaagagaaatataaacatatatttttactattaaaatattcagttttttaaatgaagtagaacttgagttcatgttttatatgaaatatttaccaaaaaaaaaaaatgaggtaaactgtatttaaaacctttgacttgagtctgctggtaaagcttctgaatattgagtttgctgagaaataaaaatcaaaacttctttaagctggtaaagtgaggggcccaccagcagtgatctcctgatgccttactggaaactttgtttacttgtctgctaccctctgatttgtttttagttagtttttattgtgagcacacatagtacctagttacatcttaagatcaggtttataaaactgtggagtggagcggtatggtatggaatgacttggaatgtaagctgtcagggagaaaatgttgttacacttttgctaagatctgggggtttcttcatattcctgctgttggaagcagttgaccagaaatgcttgccagtactgccaaagcactgctgtgaaatgtgaagtactttgtttttttatttttaatgattttctttttgttattaatatttttctctgttcctttgttattacttgcatggtttggcgtcagaagtccttacctctttatattgtttgcaggtttaaataaaacagtgtggtgccattttga

SEQ ID NO: 112 - skipped
  AKAP9

SEQ ID NO: 113 - DNA, 11088 bp, Human
  ATRX
aattctcctgcctgagcctcggcccaacaaaatggcggcggcagcggtgtcgctttgtttccgcggctcctgcggcggtggcagtggtagcggcctttgagctgtggggaggttccagcagcagctacagtgacgactaagactccagtgcatttctatcgtaaccgggcgcgggggagcgcagatcggcgcccagcaatcacagaagccgacaaggcgttcaagcgaaaacatgaccgctgagcccatgagtgaaagcaagttgaatacattggtgcagaagcttcatgacttccttgcacactcatcagaagaatctgaagaaacaagttctcctccacgacttgcaatgaatcaaaacacagataaaatcagtggttctggaagtaactctgatatgatggaaaacagcaaggaagagggaactagctcttcagaaaaatccaagtcttcaggatcgtcacgatcaaagaggaaaccttcaattgtaacaaagtatgtagaatcagatgatgaaaaacctttggatgatgaaactgtaaatgaagatgcgtctaatgaaaattcagaaaatgatattactatgcagagcttgccaaaagaagatgggcttcatgggattgtgagctgcactgcttgtggacaacaggtcaatcattttcaaaaagattccatttatagacacccttcattgcaagttcttatttgtaagaattgctttaagtattacatgagtgatgatattagccgtgactcagatggaatggatgaacaatgtaggtggtgtgcggaaggtggaaacttgatttgttgtgacttttgccataatgctttctgcaagaaatgcattctacgcaaccttggtcgaaaggagttgtccacaataatggatgaaaacaaccaatggtattgctacatttgtcacccagagcctttgttggacttggtcactgcatgtaacagcgtatttgagaatttagaacagttgttgcagcaaaataagaagaagataaaagttgacagtgaaaagagtaataaagtatatgaacatacatccagattttctccaaagaagactagttcaaattgtaatggagaagaaaagaaattagatgattcctgttctggctctgtaacctactcttattccgcactaattgtgcccaaagagatgattaagaaggcaaaaaaactgattgagaccacagccaacatgaactccagttatgttaaatttttaaagcaggcaacagataattcagaaatcagttctgctacaaaattacgtcagcttaaggcttttaagtctgtgttggctgatattaagaaggctcatcttgcattggaagaagacttaaattccgagtttcgagcgatggatgctgtaaacaaagagaaaaataccaaagagcataaagtcatagatgctaagtttgaaacaaaagcacgaaaaggagaaaaaccttgtgctttggaaaagaaggatatttcaaagtcagaagctaaactttcaagaaaacaggtagatagtgagcacatgcatcagaatgttccaacagaggaacaaagaacaaataaaagtaccggtggtgaacataagaaatctgatagaaaagaagaacctcaatatgaacctgccaacacttctgaagatttagacatggatattgtgtctgttccttcctcagttccagaagacatttttgagaatcttgagactgctatggaagttcagagttcagttgatcatcaaggggatggcagcagtggaactgaacaagaagtggagagttcatctgtaaaattaaatatttcttcaaaagacaacagaggaggtattaaatcaaaaactacagctaaagtaacaaaagaattatatgttaaactcactcctgtttccctttctaattccccaattaaaggtgctgattgtcaggaagttccacaagataaagatggctataaaagttgtggtctgaaccccaagttagagaaatgtggacttggacaggaaaacagtgataatgagcatttggttgaaaatgaagtttcattacttttagaggaatctgatcttcgaagatccccacgtgtaaagactacacccttgaggcgaccgacagaaactaaccctgtaacatctaattcagatgaagaatgtaatgaaacagttaaggagaaacaaaaactatcagttccagtgagaaaaaaggataagcgtaattcttctgacagtgctatagataatcctaagcctaataaattgccaaaatctaagcaatcagagactgtggatcaaaattcagattctgatgaaatgctagcaatcctcaaagaggtgagcaggatgagtcacagttcttcttcagatactgatattaatgaaattcatacaaaccataagactttgtatgatttaaagactcaggcggggaaagatgataaaggaaaaaggaaacgaaaaagttctacatctggctcagattttgatactaaaaagggcaaatcagctaagagctctataatttctaaaaagaaacgacaaacccagtctgagtcttctaattatgactcagaattagaaaaagagataaagagcatgagtaaaattggtgctgccagaaccaccaaaaaaagaattccaaatacaaaagattttgactcttctgaagatgagaaacacagcaaaaaaggaatggataatcaagggcacaaaaatttgaagacctcacaagaaggatcatctgatgatgctgaaagaaaacaagagagagagactttctcttcagcagaaggcacagttgataaagacacgaccatcatggaattaagagatcgacttcctaagaagcagcaagcaagtgcttccactgatggtgtcgataagctttctgggaaagagcagagttttacttctttggaagttagaaaagttgctgaaactaaagaaaagagcaagcatctcaaaaccaaaacatgtaaaaaagtacaggatggcttatctgatattgcagagaaattcctaaagaaagaccagagcgatgaaacttctgaagatgataaaaagcagagcaaaaagggaactgaagaaaaaaagaaaccttcagactttaagaaaaaagtaattaaaatggaacaacagtatgaatcttcatctgatggcactgaaaagttacctgagcgagaagaaatttgtcattttcctaagggcataaaacaaattaagaatggaacaactgatggagaaaagaaaagtaaaaaaataagagataaaacttctaaaaagaaggatgaattatctgattatgctgagaagtcaacagggaaaggagatagttgtgactcttcagaggataaaaagagtaagaatggagcatatggtagagagaagaaaaggtgcaagttgcttggaaagagttcaaggaagagacaagattgttcatcatctgatactgagaaatattccatgaaagaagatggttgtaactcttctgataagagactgaaaagaatagaattgagggaaagaagaaatttaagttcaaagagaaatactaaggaaatacaaagtggctcatcatcatctgatgctgaggaaagttctgaagataataaaaagaagaagcaaagaacttcatctaaaaagaaggcagtcattgtcaaggagaaaaagagaaactccctaagaacaagcactaaaaggaagcaagctgacattacatcctcatcttcttctgatatagaagatgatgatcagaattctataggtgagggaagcagcgatgaacagaaaattaagcctgtgactgaaaatttagtgctgtcttcacatactggattttgccaatcttcaggagatgaagccttatctaaatcagtgcctgtcacagtggatgatgatgatgacgacaatgatcctgagaatagaattgccaagaagatgcttttagaagaaattaaagccaatctttcctctgatgaggatggatcttcagatgatgagccagaagaagggaaaaaaagaactggaaaacaaaatgaagaaaacccaggagatgaggaagcaaaaaatcaagtcaattctgaatcagattcagattctgaagaatctaagaagccaagatacagacataggcttttgcggcacaaattgactgtgagtgacggagaatctggagaagaaaaaaagacaaagcctaaagagcataaagaagtcaaaggcagaaacagaagaaaggtgagcagtgaagattcagaagattctgattttcaggaatcaggagttagtgaagaagttagtgaatccgaagatgaacagcggcccagaacaaggtctgcaaagaaagcagagttggaagaaaatcagcggagctataaacagaaaaagaaaaggcgacgtattaaggttcaagaagattcatccagtgaaaacaagagtaattctgaggaagaagaggaggaaaaagaagaggaggaggaagaggaggaggaggaggaagaggaggaggaagatgaaaatgatgattccaagtctcctggaaaaggcagaaagaaaattcggaagattcttaaagatgataaactgagaacagaaacacaaaatgctcttaaggaagaggaagagagacgaaaacgtattgctgagagggagcgtgagcgagaaaaattgagagaggtgatagaaattgaagatgcttcacccaccaagtgtccaataacaaccaagttggttttagatgaagatgaagaaaccaaagaacctttagtgcaggttcatagaaatatggttatcaaattgaaaccccatcaagtagatggtgttcagtttatgtgggattgctgctgtgagtctgtgaaaaaaacaaagaaatctccaggttcaggatgcattcttgcccactgtatgggccttggtaagactttacaggtggtaagttttcttcatacagttcttttgtgtgacaaactggatttcagcacggcgttagtggtttgtcctcttaatactgctttgaattggatgaatgaatttgagaagtggcaagagggattaaaagatgatgagaagcttgaggtttctgaattagcaactgtgaaacgtcctcaggagagaagctacatgctgcagaggtggcaagaagatggtggtgttatgatcataggctatgagatgtatagaaatcttgctcaaggaaggaatgtgaagagtcggaaacttaaagaaatatttaacaaagctttggttgatccaggccctgattttgttgtttgtgatgaaggccatattctaaaaaatgaagcatctgctgtttctaaagctatgaattctatacgatcaaggaggaggattattttaacaggaacaccacttcaaaataacctaattgagtatcattgtatggttaattttatcaaggaaaatttacttggatccattaaggagttcaggaatagatttataaatccaattcaaaatggtcagtgtgcagattctaccatggtagatgtcagagtgatgaaaaaacgtgctcacattctctatgagatgttagctggatgtgttcagaggaaagattatacagcattaacaaaattcttgcctccaaaacacgaatatgtgttagctgtgagaatgacttctattcagtgcaagctctatcagtactacttagatcacttaacaggtgtgggcaataatagtgaaggtggaagaggaaaggcaggtgcaaagcttttccaagattttcagatgttaagtagaatatggactcatccttggtgtttgcagctagactacattagcaaagaaaataagggttattttgatgaagacagtatggatgaatttatagcctcagattctgatgaaacctccatgagtttaagctccgatgattatacaaaaaagaagaaaaaagggaaaaaggggaaaaaagatagtagctcaagtggaagtggcagtgacaatgatgttgaagtgattaaggtctggaattcaagatctcggggaggtggtgaaggaaatgtggatgaaacaggaaacaatccttctgtttctttaaaactggaagaaagtaaagctacttcttcttctaatccaagcagcccagctccagactggtacaaagattttgttacagatgctgatgctgaggttttagagcattctgggaaaatggtacttctctttgaaattcttcgaatggcagaggaaattggggataaagtccttgttttcagccagtccctcatatctctggacttgattgaagattttcttgaattagctagtagggagaagacagaagataaagataaaccccttatttataaaggtgaggggaagtggcttcgaaacattgactattaccgtttagatggttccactactgcacagtcaaggaagaagtgggctgaagaatttaatgatgaaactaatgtgagaggacgattatttatcatttctactaaagcaggatctctaggaattaatctggtagctgctaatcgagtaattatattcgacgcttcttggaatccatcttatgacatccagagtatattcagagtttatcgctttggacaaactaagcctgtttatgtatataggttcttagctcagggaaccatggaagataagatttatgatcggcaagtaactaagcagtcactgtcttttcgagttgttgatcagcagcaggtggagcgtcattttactatgaatgagcttactgaactttatacttttgagccagacttattagatgaccctaattcagaaaagaagaagaagagggatactcccatgctgccaaaggataccatacttgcagagctccttcagatacataaagaacacattgtaggataccatgaacatgattctcttttggaccacaaagaagaagaagagttgactgaagaagaaagaaaagcagcttgggctgagtatgaagcagagaagaagggactgaccatgcgtttcaacataccaactgggaccaatttaccccctgtcagtttcaactctcaaactccttatattcctttcaatttgggagccctgtcagcaatgagtaatcaacagctggaggacctcattaatcaaggaagagaaaaagttgtagaagcaacaaacagtgtgacagcagtgaggattcaacctcttgaggatataatttcagctgtatggaaggagaacatgaatctctcagaggcccaagtacaggcgttagcattaagtagacaagccagccaggagcttgatgttaaacgaagagaagcaatctacaatgatgtattgacaaaacaacagatgttaatcagctgtgttcagcgaatacttatgaacagaaggctccagcagcagtacaatcagcagcaacagcaacaaatgacttatcaacaagcaacactgggtcacctcatgatgccaaagcccccaaatttgatcatgaatccttctaactaccagcagattgatatgagaggaatgtatcagccagtggctggtggtatgcagccaccaccattacagcgtgcaccacccccaatgagaagcaaaaatccaggaccttcccaagggaaatcaatgtgattttgcactaaaagcttaatggattgttaaaatcatagaaagatcttttatttttttaggaatcaatgacttaacagaactcaactgtataaatagtttggtccccttaaatgccaatcttccatattagttttactttttttttttttaaatagggcataccatttcttcctgacatttgtcagtgatgttgcctagaatcttcttacacacgctgagtacagaagatatttcaaattgttttcagtgaaaacaagtccttccataatagtaacaactccacagatttcctctctaaatttttatgcctgcttttagcaaccataaaattgtcataaaattaataaatttaggaaagaataaagatttatatattcattctttacatataaaaacacacagctgagttcttagagttgattcctcaagttatgaaatacttttgtacttaatccatttcttgattaaagtgattgaaatggttttaatgttcttttgactgaagtctgaaactgggctcctgctttattgtctctgtgactgaaagttagaaactgagggttatctttgacacagaattgtgtgcaatattcttaaatactactgctctaaaagttggagaagtcttgcagttatcttagcattgtataaacagccttaagtatagcctaagaagagaattcctttttcttctttagtccttctgccattttttattttcagttatatgtgctgaaataattactggtaaaatttcagggttgtggattatcttccacacatgaattttctctctcctggcacgaatataaagcacatctcttaactgcatggtgccagtgctaatgcttcatcctgttgctggcagtgggatgtggacttagaaaatcaagttctagcattttagtaggttaacactgaagttgtggttgttaggttcacaccctgttttataaacaacatcaaaatggcagaaccattgctgactttaggttcacatgaggaatgtacttttaacaattcccagtactatcagtattgtgaaataattcctctgaaagataagaatcactggcttctatgcgcttcttttctctcatcatcatgttcttttaccccagtttccttacatttttttaaattgtttcagagtttgttttttttttagtttagattgtgaggcaattattaaatcaaaattaattcatccaatacccctttactagaagttttactagaaaatgtattacattttattttttcttaatccagttctgcaaaaatgacctataaatttattcatgtacaattttggttacttgaattgttaaagaaaacattgtttttgactatgggagtcaactcaacatggcagaaccatttttgagatgatgatacaacaggtagtgaaacagcttaagaattccaaaaaaaaaaaaaaaaaaaaaaaaaagaaaactgggtttgggctttgctttaggtatcactggattagaatgagtttaacattagctaaaactgctttgagttgtttggatgattaagagattgccatttttatcttggaagaactagtggtaaaacatccaagagcactaggattgtgatacagaatttgtgaggtttggtggatccacgcccctctcccccactttcccatgatgaaatatcactaataaatcctgtatatttagatattatgctagccatgtaatcagatttatttaattgggtggggcaggtgtgtatttactttagaaaaaatgaaaaagacaagatttatgagaaatatttgaaggcagtacactctggccaactgttaccagttggtatttctacaagttcagaatattttaaacctgatttactagacctgggaattttcaacatggtctaattatttactcaaagacatagatgtgaaaattttaggcaaccttctaaatctttttcaccatggatgaaactataacttaaagaataatacttagaagggttaattggaaatcagagtttgaaataaaacttggaccactttgtatacactcttctcacttgacattttagctatataatatgtactttgagtataacatcaagctttaacaaatatttaaagacaaaaaaatcacgtcagtaaaatactaaaaggctcatttttatatttgttttagatgttttaaatagttgcaatggattaaaaatgatgatttaaaatgttgcttgtaatacagttttgcctgctaaattctccacattttgtaacctgttttatttctttgggtgtaaagcgtttttgcttagtattgtgatattgtatatgttttgtcccagttgtatagtaatgtttcagtccatcatccagctttggctgctgaaatcatacagctgtgaagacttgcctttgtttctgttagactgcttttcagttctgtattgagtatcttaagtactgtagaaaagatgtcacttcttcctttaaggctgttttgtaatatatataaggactggaattgtgtttttaaagaaaagcattcaagtatgacaatatactatctgtgttttcaccattcaaagtgctgtttagtagttgaaacttaaactatttaatgtcatttaataaagtgaccaaaatgtgttgtgctctttattgtattttcacagctttgaaaatctgtgcacatactgtttcatagaaaatgtatagcttttgttgtcctatataatggtggttcttttgcacatttagttatttaatattgagaggtcacgaagtttggttattgaatctgttatatactaaattctgtaaagggagatctctcatctcaaaaagaatttacataccaggaagtccatgtgtgtttgtgttagttttggatgtctttgtgtaatccagccccatttcctgtttcccaacagctgtaacactcattttaagtcaagcagggctaccaacccacacttgatagaaaagctgcttaccattcagaagcttccttattacctggcctccaaatgagctgaatattttgtagccttcccttagctatgttcattttccctccattatcataaaatcagatcgatatttatgtgccccaaacaaaactttaagagcagttacattctgtcccagtagcccttgtttcctttgagagtagcatgttgtgaggctatagagacttattctaccagtaaaacaggtcaatccttttacatgtttattatactaaaaattatgttcagggtatttactactttatttcaccagactcagtctcaagtgacttggctatctccaaatcagatctacccttagagaataaacatttttctaccgttattttttttcaagtctataatctgagccagtcccaaaggagtgatcaagtttcagaaatgctttcatcttcacaacattttatatatactattatatggggtgaataaagttttaaatccgaaatataaaaaaaaaaaaaaaaaaa

SEQ ID NO: 114 - DNA, 11202 bp, Human
  ATRX
aattctcctgcctgagcctcggcccaacaaaatggcggcggcagcggtgtcgctttgtttccgcggctcctgcggcggtggcagtggtagcggcctttgagctgtggggaggttccagcagcagctacagtgacgactaagactccagtgcatttctatcgtaaccgggcgcgggggagcgcagatcggcgcccagcaatcacagaagccgacaaggcgttcaagcgaaaacatgaccgctgagcccatgagtgaaagcaagttgaatacattggtgcagaagcttcatgacttccttgcacactcatcagaagaatctgaagaaacaagttctcctccacgacttgcaatgaatcaaaacacagataaaatcagtggttctggaagtaactctgatatgatggaaaacagcaaggaagagggaactagctcttcagaaaaatccaagtcttcaggatcgtcacgatcaaagaggaaaccttcaattgtaacaaagtatgtagaatcagatgatgaaaaacctttggatgatgaaactgtaaatgaagatgcgtctaatgaaaattcagaaaatgatattactatgcagagcttgccaaaaggtacagtgattgtacagccagagccagtgctgaatgaagacaaagatgattttaaagggcctgaatttagaagcagaagtaaaatgaaaactgaaaatctcaaaaaacgcggagaagatgggcttcatgggattgtgagctgcactgcttgtggacaacaggtcaatcattttcaaaaagattccatttatagacacccttcattgcaagttcttatttgtaagaattgctttaagtattacatgagtgatgatattagccgtgactcagatggaatggatgaacaatgtaggtggtgtgcggaaggtggaaacttgatttgttgtgacttttgccataatgctttctgcaagaaatgcattctacgcaaccttggtcgaaaggagttgtccacaataatggatgaaaacaaccaatggtattgctacatttgtcacccagagcctttgttggacttggtcactgcatgtaacagcgtatttgagaatttagaacagttgttgcagcaaaataagaagaagataaaagttgacagtgaaaagagtaataaagtatatgaacatacatccagattttctccaaagaagactagttcaaattgtaatggagaagaaaagaaattagatgattcctgttctggctctgtaacctactcttattccgcactaattgtgcccaaagagatgattaagaaggcaaaaaaactgattgagaccacagccaacatgaactccagttatgttaaatttttaaagcaggcaacagataattcagaaatcagttctgctacaaaattacgtcagcttaaggcttttaagtctgtgttggctgatattaagaaggctcatcttgcattggaagaagacttaaattccgagtttcgagcgatggatgctgtaaacaaagagaaaaataccaaagagcataaagtcatagatgctaagtttgaaacaaaagcacgaaaaggagaaaaaccttgtgctttggaaaagaaggatatttcaaagtcagaagctaaactttcaagaaaacaggtagatagtgagcacatgcatcagaatgttccaacagaggaacaaagaacaaataaaagtaccggtggtgaacataagaaatctgatagaaaagaagaacctcaatatgaacctgccaacacttctgaagatttagacatggatattgtgtctgttccttcctcagttccagaagacatttttgagaatcttgagactgctatggaagttcagagttcagttgatcatcaaggggatggcagcagtggaactgaacaagaagtggagagttcatctgtaaaattaaatatttcttcaaaagacaacagaggaggtattaaatcaaaaactacagctaaagtaacaaaagaattatatgttaaactcactcctgtttccctttctaattccccaattaaaggtgctgattgtcaggaagttccacaagataaagatggctataaaagttgtggtctgaaccccaagttagagaaatgtggacttggacaggaaaacagtgataatgagcatttggttgaaaatgaagtttcattacttttagaggaatctgatcttcgaagatccccacgtgtaaagactacacccttgaggcgaccgacagaaactaaccctgtaacatctaattcagatgaagaatgtaatgaaacagttaaggagaaacaaaaactatcagttccagtgagaaaaaaggataagcgtaattcttctgacagtgctatagataatcctaagcctaataaattgccaaaatctaagcaatcagagactgtggatcaaaattcagattctgatgaaatgctagcaatcctcaaagaggtgagcaggatgagtcacagttcttcttcagatactgatattaatgaaattcatacaaaccataagactttgtatgatttaaagactcaggcggggaaagatgataaaggaaaaaggaaacgaaaaagttctacatctggctcagattttgatactaaaaagggcaaatcagctaagagctctataatttctaaaaagaaacgacaaacccagtctgagtcttctaattatgactcagaattagaaaaagagataaagagcatgagtaaaattggtgctgccagaaccaccaaaaaaagaattccaaatacaaaagattttgactcttctgaagatgagaaacacagcaaaaaaggaatggataatcaagggcacaaaaatttgaagacctcacaagaaggatcatctgatgatgctgaaagaaaacaagagagagagactttctcttcagcagaaggcacagttgataaagacacgaccatcatggaattaagagatcgacttcctaagaagcagcaagcaagtgcttccactgatggtgtcgataagctttctgggaaagagcagagttttacttctttggaagttagaaaagttgctgaaactaaagaaaagagcaagcatctcaaaaccaaaacatgtaaaaaagtacaggatggcttatctgatattgcagagaaattcctaaagaaagaccagagcgatgaaacttctgaagatgataaaaagcagagcaaaaagggaactgaagaaaaaaagaaaccttcagactttaagaaaaaagtaattaaaatggaacaacagtatgaatcttcatctgatggcactgaaaagttacctgagcgagaagaaatttgtcattttcctaagggcataaaacaaattaagaatggaacaactgatggagaaaagaaaagtaaaaaaataagagataaaacttctaaaaagaaggatgaattatctgattatgctgagaagtcaacagggaaaggagatagttgtgactcttcagaggataaaaagagtaagaatggagcatatggtagagagaagaaaaggtgcaagttgcttggaaagagttcaaggaagagacaagattgttcatcatctgatactgagaaatattccatgaaagaagatggttgtaactcttctgataagagactgaaaagaatagaattgagggaaagaagaaatttaagttcaaagagaaatactaaggaaatacaaagtggctcatcatcatctgatgctgaggaaagttctgaagataataaaaagaagaagcaaagaacttcatctaaaaagaaggcagtcattgtcaaggagaaaaagagaaactccctaagaacaagcactaaaaggaagcaagctgacattacatcctcatcttcttctgatatagaagatgatgatcagaattctataggtgagggaagcagcgatgaacagaaaattaagcctgtgactgaaaatttagtgctgtcttcacatactggattttgccaatcttcaggagatgaagccttatctaaatcagtgcctgtcacagtggatgatgatgatgacgacaatgatcctgagaatagaattgccaagaagatgcttttagaagaaattaaagccaatctttcctctgatgaggatggatcttcagatgatgagccagaagaagggaaaaaaagaactggaaaacaaaatgaagaaaacccaggagatgaggaagcaaaaaatcaagtcaattctgaatcagattcagattctgaagaatctaagaagccaagatacagacataggcttttgcggcacaaattgactgtgagtgacggagaatctggagaagaaaaaaagacaaagcctaaagagcataaagaagtcaaaggcagaaacagaagaaaggtgagcagtgaagattcagaagattctgattttcaggaatcaggagttagtgaagaagttagtgaatccgaagatgaacagcggcccagaacaaggtctgcaaagaaagcagagttggaagaaaatcagcggagctataaacagaaaaagaaaaggcgacgtattaaggttcaagaagattcatccagtgaaaacaagagtaattctgaggaagaagaggaggaaaaagaagaggaggaggaagaggaggaggaggaggaagaggaggaggaagatgaaaatgatgattccaagtctcctggaaaaggcagaaagaaaattcggaagattcttaaagatgataaactgagaacagaaacacaaaatgctcttaaggaagaggaagagagacgaaaacgtattgctgagagggagcgtgagcgagaaaaattgagagaggtgatagaaattgaagatgcttcacccaccaagtgtccaataacaaccaagttggttttagatgaagatgaagaaaccaaagaacctttagtgcaggttcatagaaatatggttatcaaattgaaaccccatcaagtagatggtgttcagtttatgtgggattgctgctgtgagtctgtgaaaaaaacaaagaaatctccaggttcaggatgcattcttgcccactgtatgggccttggtaagactttacaggtggtaagttttcttcatacagttcttttgtgtgacaaactggatttcagcacggcgttagtggtttgtcctcttaatactgctttgaattggatgaatgaatttgagaagtggcaagagggattaaaagatgatgagaagcttgaggtttctgaattagcaactgtgaaacgtcctcaggagagaagctacatgctgcagaggtggcaagaagatggtggtgttatgatcataggctatgagatgtatagaaatcttgctcaaggaaggaatgtgaagagtcggaaacttaaagaaatatttaacaaagctttggttgatccaggccctgattttgttgtttgtgatgaaggccatattctaaaaaatgaagcatctgctgtttctaaagctatgaattctatacgatcaaggaggaggattattttaacaggaacaccacttcaaaataacctaattgagtatcattgtatggttaattttatcaaggaaaatttacttggatccattaaggagttcaggaatagatttataaatccaattcaaaatggtcagtgtgcagattctaccatggtagatgtcagagtgatgaaaaaacgtgctcacattctctatgagatgttagctggatgtgttcagaggaaagattatacagcattaacaaaattcttgcctccaaaacacgaatatgtgttagctgtgagaatgacttctattcagtgcaagctctatcagtactacttagatcacttaacaggtgtgggcaataatagtgaaggtggaagaggaaaggcaggtgcaaagcttttccaagattttcagatgttaagtagaatatggactcatccttggtgtttgcagctagactacattagcaaagaaaataagggttattttgatgaagacagtatggatgaatttatagcctcagattctgatgaaacctccatgagtttaagctccgatgattatacaaaaaagaagaaaaaagggaaaaaggggaaaaaagatagtagctcaagtggaagtggcagtgacaatgatgttgaagtgattaaggtctggaattcaagatctcggggaggtggtgaaggaaatgtggatgaaacaggaaacaatccttctgtttctttaaaactggaagaaagtaaagctacttcttcttctaatccaagcagcccagctccagactggtacaaagattttgttacagatgctgatgctgaggttttagagcattctgggaaaatggtacttctctttgaaattcttcgaatggcagaggaaattggggataaagtccttgttttcagccagtccctcatatctctggacttgattgaagattttcttgaattagctagtagggagaagacagaagataaagataaaccccttatttataaaggtgaggggaagtggcttcgaaacattgactattaccgtttagatggttccactactgcacagtcaaggaagaagtgggctgaagaatttaatgatgaaactaatgtgagaggacgattatttatcatttctactaaagcaggatctctaggaattaatctggtagctgctaatcgagtaattatattcgacgcttcttggaatccatcttatgacatccagagtatattcagagtttatcgctttggacaaactaagcctgtttatgtatataggttcttagctcagggaaccatggaagataagatttatgatcggcaagtaactaagcagtcactgtcttttcgagttgttgatcagcagcaggtggagcgtcattttactatgaatgagcttactgaactttatacttttgagccagacttattagatgaccctaattcagaaaagaagaagaagagggatactcccatgctgccaaaggataccatacttgcagagctccttcagatacataaagaacacattgtaggataccatgaacatgattctcttttggaccacaaagaagaagaagagttgactgaagaagaaagaaaagcagcttgggctgagtatgaagcagagaagaagggactgaccatgcgtttcaacataccaactgggaccaatttaccccctgtcagtttcaactctcaaactccttatattcctttcaatttgggagccctgtcagcaatgagtaatcaacagctggaggacctcattaatcaaggaagagaaaaagttgtagaagcaacaaacagtgtgacagcagtgaggattcaacctcttgaggatataatttcagctgtatggaaggagaacatgaatctctcagaggcccaagtacaggcgttagcattaagtagacaagccagccaggagcttgatgttaaacgaagagaagcaatctacaatgatgtattgacaaaacaacagatgttaatcagctgtgttcagcgaatacttatgaacagaaggctccagcagcagtacaatcagcagcaacagcaacaaatgacttatcaacaagcaacactgggtcacctcatgatgccaaagcccccaaatttgatcatgaatccttctaactaccagcagattgatatgagaggaatgtatcagccagtggctggtggtatgcagccaccaccattacagcgtgcaccacccccaatgagaagcaaaaatccaggaccttcccaagggaaatcaatgtgattttgcactaaaagcttaatggattgttaaaatcatagaaagatcttttatttttttaggaatcaatgacttaacagaactcaactgtataaatagtttggtccccttaaatgccaatcttccatattagttttactttttttttttttaaatagggcataccatttcttcctgacatttgtcagtgatgttgcctagaatcttcttacacacgctgagtacagaagatatttcaaattgttttcagtgaaaacaagtccttccataatagtaacaactccacagatttcctctctaaatttttatgcctgcttttagcaaccataaaattgtcataaaattaataaatttaggaaagaataaagatttatatattcattctttacatataaaaacacacagctgagttcttagagttgattcctcaagttatgaaatacttttgtacttaatccatttcttgattaaagtgattgaaatggttttaatgttcttttgactgaagtctgaaactgggctcctgctttattgtctctgtgactgaaagttagaaactgagggttatctttgacacagaattgtgtgcaatattcttaaatactactgctctaaaagttggagaagtcttgcagttatcttagcattgtataaacagccttaagtatagcctaagaagagaattcctttttcttctttagtccttctgccattttttattttcagttatatgtgctgaaataattactggtaaaatttcagggttgtggattatcttccacacatgaattttctctctcctggcacgaatataaagcacatctcttaactgcatggtgccagtgctaatgcttcatcctgttgctggcagtgggatgtggacttagaaaatcaagttctagcattttagtaggttaacactgaagttgtggttgttaggttcacaccctgttttataaacaacatcaaaatggcagaaccattgctgactttaggttcacatgaggaatgtacttttaacaattcccagtactatcagtattgtgaaataattcctctgaaagataagaatcactggcttctatgcgcttcttttctctcatcatcatgttcttttaccccagtttccttacatttttttaaattgtttcagagtttgttttttttttagtttagattgtgaggcaattattaaatcaaaattaattcatccaatacccctttactagaagttttactagaaaatgtattacattttattttttcttaatccagttctgcaaaaatgacctataaatttattcatgtacaattttggttacttgaattgttaaagaaaacattgtttttgactatgggagtcaactcaacatggcagaaccatttttgagatgatgatacaacaggtagtgaaacagcttaagaattccaaaaaaaaaaaaaaaaaaaaaaaaaagaaaactgggtttgggctttgctttaggtatcactggattagaatgagtttaacattagctaaaactgctttgagttgtttggatgattaagagattgccatttttatcttggaagaactagtggtaaaacatccaagagcactaggattgtgatacagaatttgtgaggtttggtggatccacgcccctctcccccactttcccatgatgaaatatcactaataaatcctgtatatttagatattatgctagccatgtaatcagatttatttaattgggtggggcaggtgtgtatttactttagaaaaaatgaaaaagacaagatttatgagaaatatttgaaggcagtacactctggccaactgttaccagttggtatttctacaagttcagaatattttaaacctgatttactagacctgggaattttcaacatggtctaattatttactcaaagacatagatgtgaaaattttaggcaaccttctaaatctttttcaccatggatgaaactataacttaaagaataatacttagaagggttaattggaaatcagagtttgaaataaaacttggaccactttgtatacactcttctcacttgacattttagctatataatatgtactttgagtataacatcaagctttaacaaatatttaaagacaaaaaaatcacgtcagtaaaatactaaaaggctcatttttatatttgttttagatgttttaaatagttgcaatggattaaaaatgatgatttaaaatgttgcttgtaatacagttttgcctgctaaattctccacattttgtaacctgttttatttctttgggtgtaaagcgtttttgcttagtattgtgatattgtatatgttttgtcccagttgtatagtaatgtttcagtccatcatccagctttggctgctgaaatcatacagctgtgaagacttgcctttgtttctgttagactgcttttcagttctgtattgagtatcttaagtactgtagaaaagatgtcacttcttcctttaaggctgttttgtaatatatataaggactggaattgtgtttttaaagaaaagcattcaagtatgacaatatactatctgtgttttcaccattcaaagtgctgtttagtagttgaaacttaaactatttaatgtcatttaataaagtgaccaaaatgtgttgtgctctttattgtattttcacagctttgaaaatctgtgcacatactgtttcatagaaaatgtatagcttttgttgtcctatataatggtggttcttttgcacatttagttatttaatattgagaggtcacgaagtttggttattgaatctgttatatactaaattctgtaaagggagatctctcatctcaaaaagaatttacataccaggaagtccatgtgtgtttgtgttagttttggatgtctttgtgtaatccagccccatttcctgtttcccaacagctgtaacactcattttaagtcaagcagggctaccaacccacacttgatagaaaagctgcttaccattcagaagcttccttattacctggcctccaaatgagctgaatattttgtagccttcccttagctatgttcattttccctccattatcataaaatcagatcgatatttatgtgccccaaacaaaactttaagagcagttacattctgtcccagtagcccttgtttcctttgagagtagcatgttgtgaggctatagagacttattctaccagtaaaacaggtcaatccttttacatgtttattatactaaaaattatgttcagggtatttactactttatttcaccagactcagtctcaagtgacttggctatctccaaatcagatctacccttagagaataaacatttttctaccgttattttttttcaagtctataatctgagccagtcccaaaggagtgatcaagtttcagaaatgctttcatcttcacaacattttatatatactattatatggggtgaataaagttttaaatccgaaatataaaaaaaaaaaaaaaaaaa

SEQ ID NO: 115 - DNA, 6918 bp, Human
  GCC2
ctttgacctgcagtagagcctacgtcagaggctggcgcaaacagaagtgcagcggtggcggcggctggttgcgggccggcggcgggctggcggagatggaggatcttgttcaagatggggtggcttcaccagctacccctgggaccgggaaatctaagctggaaacattgcccaaagaagacctcatcaagtttgccaagaaacagatgatgctaatacagaaagctaaatcaaggtgtacagaattggagaaagaaattgaagaactcagatcaaaacctgttactgaaggaactggtgatattattaaggcattaactgaacgtctggatgctcttcttctggaaaaagcagagactgagcaacagtgtctttctctgaaaaaggaaaatataaaaatgaagcaagaggttgaggattctgtaacaaagatgggagatgcacataaggagttggaacaatcacatataaactatgtgaaagaaattgaaaatttgaaaaatgagttgatggcagtacgttccaaatacagtgaagacaaagctaacttacaaaagcagctggaagaagcaatgaatacgcaattagaactttcagaacaacttaaatttcagaacaactctgaagataatgttaaaaaactacaagaagagattgagaaaattaggccaggctttgaggagcaaattttatatctgcaaaagcaattagacgctaccactgatgaaaagaaggaaacagttactcaactccaaaatatcattgaggctaattctcagcattaccaaaaaaatattaatagtttgcaggaagagcttttacagttgaaagctatacaccaagaagaggtgaaagagttgatgtgccagattgaagcatcagctaaggaacatgaagcagagataaataagttgaacgagctaaaagagaacttagtaaaacaatgtgaggcaagtgaaaagaacatccagaagaaatatgaatgtgagttagaaaatttaaggaaagccacctcaaatgcaaaccaagacaatcagatatgttctattctcttgcaagaaaatacatttgtagaacaagtagtaaatgaaaaagtcaaacacttagaagataccttaaaagaacttgaatctcaacacagtatcttaaaagatgaggtaacttatatgaataatcttaagttaaaacttgaaatggatgctcaacatataaaggatgagttttttcatgaacgggaagacttagagtttaaaattaatgaattattactagctaaagaagaacagggctgtgtaattgaaaaattaaaatctgagctagcaggtttaaataaacagttttgctatactgtagaacagcataacagagaagtacagagtcttaaggaacaacatcaaaaagaaatatcagaactaaatgagacatttttgtcagattcagaaaaagaaaaattaacattaatgtttgaaatacagggtcttaaggaacagtgtgaaaacctacagcaagaaaagcaagaagcaattttaaattatgagagtttacgagagattatggaaattttacaaacagaactgggggaatctgctggaaaaataagtcaagagttcgaatcaatgaagcaacagcaagcatctgatgttcatgaactgcagcagaagctcagaactgcttttactgaaaaagatgcccttctcgaaactgtgaatcgcctccagggagaaaatgaaaagttactatctcaacaagaattggtaccagaacttgaaaataccataaagaaccttcaagaaaagaatggagtatacttacttagtctcagtcaaagagataccatgttaaaagaattagaaggaaagataaattctcttactgaggaaaaagatgattttataaataaactgaaaaattcccatgaagaaatggataatttccataagaaatgtgaaagggaagaaagattgattcttgaacttgggaagaaagtagagcaaacaatccagtacaacagtgaactagaacaaaaggtaaatgaattaacaggaggactagaggagactttaaaagaaaaggatcaaaatgaccaaaaactagaaaaacttatggttcaaatgaaagttctctctgaagacaaagaagtattgtcagctgaagtgaagtctctttatgaggaaaacaataaactcagttcagaaaaaaaacagttgagtagggatttggaggtttttttgtctcaaaaagaagatgttatccttaaagaacatattactcaattagaaaagaaacttcagttaatggttgaagagcaagataatttaaataaactgcttgaaaatgagcaagttcagaagttatttgttaaaactcagttgtatggttttcttaaagaaatgggatcagaagtttcagaagacagtgaagagaaagatgttgttaatgtcctacaggcagtcggtgaatccttggcaaaaataaatgaggaaaaatgcaacctggcttttcagcgtgatgaaaaagtattagagttagaaaaagagattaagtgccttcaagaagagagtgtagttcagtgtgaagaacttaagtctttattgagagactatgagcaagagaaagttctcttaaggaaagagttagaagaaatacagtcagaaaaagaggccctgcagtctgatcttctagaaatgaagaatgctaatgaaaaaacaaggcttgaaaatcagaatcttttaattcaagttgaagaagtatctcaaacatgtagcaaaagtgaaatccataatgaaaaagaaaaatgttttataaaggaacatgaaaacctaaagccactactagaacaaaaagaattacgagataggagagcagagttgatactattaaaggattccttagcaaaatcaccttctgtaaaaaatgatcctctgtcttcagtaaaagagttggaagaaaaaatagaaaatctggaaaaagaatgcaaagaaaaggaggagaaaataaataagataaaattagttgccgtaaaggcaaagaaagaactagattccagcagaaaagagacccagactgtgaaggaagaacttgaatctcttcgatcagaaaaggaccagttatctgcttccatgagagatctcattcaaggagcagaaagctataagaatcttttattagaatatgaaaagcagtcagagcaactggatgtggaaaaagaacgtgctaataattttgagcatcgtattgaagaccttacaagacaattaagaaattcgactttgcagtgtgaaacaataaattctgataatgaagatctcctggctcgtattgagacattacagtctaatgccaaattattagaagtacagattttagaagtccagagagccaaagcaatggtagacaaagaattagaagctgaaaaacttcagaaagaacagaagataaaggaacatgccactactgtaaatgaacttgaagaacttcaggtacaacttcaaaaggaaaagaaacagcttcagaaaaccatgcaagaattagagctggttaaaaaggatgcccaacaaaccacattgatgaatatggaaatagctgattatgaacgtttgatgaaagaactaaatcaaaagttaactaataaaaacaacaagatagaagatttggagcaagaaataaaaattcaaaaacagaaacaagaaaccctacaagaagaaataacttcattacagtcttcagtacaacaatatgaagaaaaaaacaccaaaatcaagcaattgcttgtgaaaaccaaaaaggaactggcagattcaaagcaagcagaaactgatcacttaatacttcaagcatctttaaaaggtgagctggaggcaagccagcagcaagtagaagtctataaaatacagctggctgaaataacatcagagaagcacaaaatccacgagcacctgaaaacctctgcggaacagcaccagcgtacgctaagtgcataccagcagagagtgacagcactacaggaagagtgccgtgctgccaaggcagaacaagctactgtaacctctgaattcgagagctacaaagtccgagttcataatgttctaaaacaacagaaaaataaatctatgtctcaggctgaaactgagggcgctaaacaagaaagggaacatctggaaatgctgattgaccagctaaaaatcaaattacaagatagccaaaataacttacagattaatgtatctgaacttcaaacattgcagtctgaacatgatacactgctagaaaggcacaacaagatgctgcaggaaactgtgtccaaagaggcggaactccgggaaaaattgtgttcaatacagtcagagaacatgatgatgaaatctgaacatacacagactgtgagtcagctaacatcccagaacgaggtccttcgaaatagcttccgagatcaagtgcgacatttgcaggaagaacacagaaagacagtggagacattacagcagcagctctccaagatggaagcacagctcttccagcttaagaatgaaccgaccacaagaagcccagtttcctctcaacaatctttgaagaaccttcgagaaaggagaaacacagacctcccgcttctagacatgcacactgtaacccgggaagagggagaaggcatggagacaactgatacggagtctgtgtcttccgccagcacatacacacagtctttagagcagctgcttaactctcccgaaactaaacttgagcctccattatggcatgctgaatttaccaaagaagaattggttcagaagctcagttccaccacaaaaagtgcagatcacttaaacggcctgcttcgggaaacagaagcaaccaatgcaattcttatggagcaaattaagcttctcaaaagtgaaataagaagattggaaaggaatcaagagcgagagaagtctgcagctaacctggaatacttgaagaacgtcttgctgcagttcattttcttgaaaccaggtagtgaaagagagagacttcttcctgttataaatacgatgttgcagctcagccctgaagaaaagggaaaacttgctgcggttgctcaaggtgaggaagaaaatgcttcccgttcttctggatgggcatcctatcttcatagttggtctggacttcgataggttgatggaaggaatatttttattaaccaaatagaatctatttacaaaaatggttcacgtatattaccacaattcttttgtcaaaaagtgtgtatatatgtttgcatctacatatatttgtacatctatatgacagatgtattttaaaagtttcatcttgaagtaaaagtacaacagcttgaagtgttgatagcaggccacagccctctaactcatgtgatttcccatgcatgctgccagaataaaaccaccaggaatgaattcactccccacttctctggaacctcaggacccgcccatttctcggcagtactgtgaattttgaagttaaactaaattttggtaccataccaactggaatttaggctttaaaaataatgtttcaaggccaggtgtggtgattcatgcctgaaatcccactactttgggaggctgaggctggagaattgcttgaggctagtgagctgtgactcccactgcactccagctcggggaacagagcgagaccttgtctctaaaaataatagtaataaaataaaaataacgttttatgactatttattgcaaggtcagagttacagattgttataaattgttgagaaatttttgtgattagaatatgaaggaaaaagctttgttggtaaaagtgacatgttaaggggctatgaagtaaatatgctgcagttaattatgctaagttaaaatacagtttagttatttgctttaaaataaactcttctttttttctttaaagtatactatctcaaaactcattatgttgtcagagccctagagctggctagtgtaacactgactatgagtaggtgggcccacacttgagttgaggtgatttcatggtgtctttccaggctcttgatagggtgtcactgcatgcaagccatgaatctgttttgagaatcctctccattttcccaaataaaaacctatcacaacagtgactatatcactcagcattggatctaaatataaaagtggtgctttcagtgtttttggcagatagtgttccataagctttccatcagaagggattttagacaccttagaggtccgtgctacatcgtcacagttcctccgaataaccttaggtggtagtgttacttgcctttgacacctctgcatatgttttaatgactagatccaaactgtgttgttcttaaatcaaaaattggataatttgtaatatttatgtgttaatcacacagtatgctctctgaagttctcttaagccttcagtttatactcttaatttaattttctttctgagctggagaactggctttgcactttggttacacagaacattggtttccaattcagtttaactgaaatttgctgctgatatgttgagtttgttctttaaaaaatagctcatatatctcatctttcctcctgtcttagaagaacagacctaactagtgaatgtattaatgaaaatgcatctatttcagagctgacatgaagagtttagtttttttactttataaactgtgaatatgagtatgccagctgcatacgatgtaactaatcatatttaaatatatttcactttctctttgactttagaccttttgaagtctgtataaacttgttttgaaatatagtctctgcttacgaatgtcataacaaaataattttttgcatgataaaaaattactttgattacaaaaggcatattctttcatggtttctgcaatgagaggaagtgtaatgattattttaatatttctattaaatatgtttaactgta

SEQ ID NO: 116 - DNA, 7717 bp, Human
  GOLGA4
gccgcgcaagcgcccttggcgcacagttcacctgctgccgttgtcgtcgccgccgcggctcccggggctggatggggggccgaggccagccagtggcacccggaagaaagagacgcggcggcggcgacgccgacaccctcaggacgagtgtccggacttgcccacagcctcaaggaggagacggcgaggcccggcccccgctgtccctggtgtaaagaagtcgccgtagccgtcgcggccgggactccccgggctctcgcccttcaggtttcgttgacactcaggaccgtacgtacgctgcgccatgttcaagaaactgaagcaaaagatcagcgaggagcagcagcagctccagcaggcgctggctcctgctcaggcgtcctccaattcttcaacaccaacaagaatgaggagcaggacatcttcatttacagagcaacttgatgaaggtacacccaatagagagtcaggtgacacacagtcttttgcacagaagctccagctccgggtgccctccgtggagtctttgtttcgaagtccgataaaggaatctctattccggtcttcttctaaagagtctttggtacgaacatcttccagagaatccctgaatcgacttgacctggacagttctactgccagttttgatccaccctctgatatggatagcgaggctgaagacttggtagggaattcagacagtctcaacaaagaacagttgattcagcggttgcgaagaatggaacgaagcttaagtagctacaggggaaaatattctgagcttgttacagcttatcagatgcttcagagagagaagaaaaagctacaaggtatattaagtcagagtcaggataaatcacttcggagaatagcagaattaagagaggagctccaaatggaccagcaggcaaagaaacatctgcaagaggagtttgatgcatctttagaggagaaagatcagtatatcagtgttctccaaactcaggtttctctactgaaacaacgattacgaaatggcccgatgaatgttgatgtactgaaaccacttcctcagctggaaccacaggctgaagtcttcactaaagaagagaatccagaaagtgatggagagccagtagtggaagatggaacttctgtaaaaacactggaaacactccagcaaagagtgaagcgtcaagagaacctacttaagcgttgtaaggaaacaattcagtcacataaggaacaatgtacactattaactagtgaaaaagaagctctgcaagaacaactggatgaaagacttcaagaactagaaaagataaaggaccttcatatggccgagaagactaaacttatcactcagttgcgtgatgcaaagaacttaattgaacagcttgaacaagataagggaatggtaatcgcagagacaaaacgtcagatgcatgaaaccctggaaatgaaagaagaagaaattgctcaactccgtagtcgcatcaaacagatgactacccagggagaggaattacgggaacagaaagaaaagtccgaaagagctgcttttgaggaacttgaaaaagctttgagtacagcccaaaaaacagaggaagcacggagaaaactgaaggcagaaatggatgaacaaataaaaactatcgaaaaaacaagtgaggaggaacgcatcagtcttcaacaggaattaagtcgggtgaaacaggaggttgttgatgtaatgaaaaaatcctcagaagaacaaattgctaagctacagaagcttcatgaaaaggagctggccagaaaagagcaggaactgaccaagaagcttcagacccgagaaagggaatttcaggaacaaatgaaagtagctcttgaaaagagtcaatcagaatatttgaagatcagccaagaaaaagaacagcaagaatctttggccctagaagagttagagttgcagaaaaaagcaatcctcacagaaagtgaaaataaacttcgggaccttcagcaagaagcagagacttacagaactagaattcttgaattggaaagttctttggaaaaaagcttacaagaaaacaaaaatcagtcaaaagatttggctgttcatctggaagctgaaaaaaataagcacaataaggagattacagtcatggttgaaaaacacaagacagaattggaaagccttaagcatcagcaggatgccctttggactgaaaaactccaagtcttaaagcaacaatatcagactgaaatggaaaaacttagggaaaagtgtgaacaagaaaaagaaacattgttgaaagacaaagagattatcttccaggcccacatagaagaaatgaatgaaaagactttagaaaagcttgatgtgaagcaaacagaactagaatcattatcttctgaactgtcagaagtattaaaagcccgtcacaaactagaagaggaactttctgttctgaaagatcaaacagataaaatgaagcaggaattagaggccaagatggatgaacagaaaaatcatcaccagcagcaagttgacagtatcattaaagaacacgaggtatctatccagaggactgagaaggcattaaaagatcaaattaatcaacttgagcttctcttgaaggaaagggacaagcatttgaaagagcatcaggctcatgtagaaaatttagaggcagatattaaaaggtctgaaggggaactccagcaggcatctgctaagctggacgtttttcagtcttaccagagtgccacacatgagcagacaaaagcatatgaggaacagttggcccaattgcagcagaagttgttggatttggaaacagaaagaattcttcttaccaaacaggttgctgaagttgaagcacaaaagaaagatgtttgtactgagttagatgctcacaaaatccaggtgcaggacttaatgcagcaacttgaaaaacaaaatagtgaaatggagcaaaaagtaaaatctttaacccaagtctatgagtccaaacttgaagatggtaacaaagaacaggaacagacaaagcaaatcttggtggaaaaggaaaatatgattttacaaatgagagaaggacagaagaaagaaattgagatactcacacagaaattgtcagccaaggaggacagtattcatattttgaatgaggaatatgaaaccaaatttaaaaaccaagaaaaaaagatggaaaaagttaagcagaaagcaaaggagatgcaagaaacgttaaagaaaaaattactggatcaggaagccaaacttaagaaagagcttgaaaatactgctctagagcttagtcagaaagaaaaacagtttaatgccaaaatgctggaaatggcacaggctaactcagctggaatcagtgatgcagtgtcaagactggaaacaaaccaaaaagaacaaatagaaagtcttactgaggttcatcgacgagaactcaatgatgtcatatcaatctgggaaaagaaacttaatcagcaagctgaagaacttcaggaaatacatgaaatccaattacaggaaaaagaacaagaggtagcagaactgaaacaaaagatcctcctatttgggtgtgaaaaagaagagatgaacaaggaaataacatggctgaaggaagaaggtgttaagcaggatacaacattaaatgaattacaggaacagttaaagcagaagtctgcccatgtgaattctcttgcacaagatgaaactaaactgaaagctcatcttgaaaagctagaggttgacttgaataagtctctgaaggaaaatacttttcttcaagagcagctagttgaactgaagatgctggcagaagaagataagcggaaggtttctgagttgactagcaagttgaaaaccacagatgaagaattccagagtttgaaatcttcacatgaaaaaagtaacaaaagcctagaggacaagagcttggaatttaaaaaactgtctgaggaactagcgattcagctagatatttgctgtaagaaaaccgaagccttattagaagctaaaacaaatgagctaatcaacattagtagtagtaaaactaatgccattctttctaggatttctcattgtcagcaccgtacaactaaagttaaggaggcactgttaattaaaacttgcacagtttctgaattagaagcacaacttagacagttgacagaggagcaaaatacactaaatatttcttttcaacaggctactcatcagttagaagaaaaagaaaatcaaattaagagcatgaaggctgatattgaaagtcttgtaacagaaaaagaagccttacagaaggaaggaggcaatcagcaacaggctgcttctgaaaaggagtcttgtataacacagttgaagaaagagttatctgaaaacatcaatgctgtcacattgatgaaagaagagcttaaagaaaaaaaagttgagattagcagtcttagtaaacaactaactgatttgaatgttcagcttcaaaatagcatcagcctatccgaaaaagaagcagccatttcatcactaagaaagcagtatgatgaagaaaaatgtgaattgctggatcaggtgcaagatttatcttttaaagttgacactctgagtaaagagaaaatttctgctcttgagcaggtagatgactggtccaataaattctcagaatggaagaagaaagcacagtcaagatttacacagcatcaaaacactgttaaagaattgcagatccagcttgagttaaaatcaaaggaagcttatgaaaaggatgagcagataaatttattgaaggaagagcttgatcagcaaaataaaagatttgattgtttaaagggtgaaatggaagacgacaagagcaagatggagaaaaaggagtctaatttagaaacagagttaaagtctcaaacagcaagaattatggaattagaggaccatattacccagaaaactattgaaatagagtccttaaatgaagttcttaaaaattacaatcaacaaaaggatattgaacacaaagaattggttcagaaacttcaacattttcaagagttaggagaagaaaaggacaacagggttaaagaagctgaagaaaaaatcttaacacttgaaaaccaagtttattccatgaaagctgaacttgaaactaagaagaaagaattagaacatgtgaatttaagtgtgaaaagcaaagaggaggagttaaaggcattggaagataggcttgagtcagaaagtgctgcaaaattagcagagttgaagagaaaagctgaacaaaaaattgctgccattaagaagcagttgttatctcaaatggaagagaaagaagaacagtataaaaaaggtacagaaagccatttgagtgagctaaatacaaaattgcaggaaagagaaagggaagttcacatcttggaagaaaaacttaagtcagtggaaagttcacagtcagaaacattaattgtacccagatcagcaaaaaatgtggcagcatatactgaacaagaagaagcagattcccaaggctgtgtgcagaagacatatgaagaaaaaatcagtgttttacaaagaaacttaactgaaaaagaaaagctattgcagagggtagggcaggaaaaagaagagacagtttcttctcattttgaaatgcgatgccaataccaggagcgcttaataaagctagaacatgctgaggcaaagcaacatgaagatcaaagtatgataggtcatcttcaagaggagcttgaagaaaaaaacaagaaatattccttgatagtagcccagcatgtggaaaaagaaggaggtaaaaataacatacaggcaaagcaaaacttggaaaatgtgtttgacgacgtccagaaaaccctccaggagaaggaactaacctgtcagattttggagcaaaagataaaagagctggattcctgcttagtaagacagaaagaagtacatagagttgaaatggaagagttgacctcaaaatatgaaaaattacaggctttacaacagatggatggaagaaataaacccacagaacttttggaagaaaacactgaagaaaagtccaaatcacatttggtccaacccaaattgcttagtaacatggaagcccagcacaatgatctggagtttaaattagccggggcagaacgggagaaacagaaactgggcaaggagattgttagattgcagaaagaccttcgaatgttgagaaaggagcatcagcaagaattggaaatactaaagaaagaatatgatcaagaaagggaagagaaaatcaaacaggagcaggaagatcttgaactgaagcacaattccacattaaaacagctgatgagggagtttaatacacagctggcacaaaaggaacaagagctggaaatgaccataaaagaaactatcaataaggcccaggaggtggaggctgaacttttagaaagccatcaagaagagacaaatcagttacttaaaaaaattgctgagaaagatgatgatctaaaacgaacagccaaaagatatgaagaaatccttgatgctcgtgaagaagaaatgactgcaaaagtaagggacctgcagactcaacttgaggagctgcagaagaaataccagcaaaagctagagcaggaggagaaccctggcaatgataatgtaacaattatggagctacagacacagctagcacagaagacgactttaatcagtgattcgaaattgaaagagcaagagttcagagaacagattcacaatttagaagaccgtttgaagaaatatgaaaagaatgtatatgcaacaactgtggggacaccttacaaaggtggcaatttgtaccatacggatgtctcactctttggagaacctaccgaatttgagtatttgcgaaaagtgctttttgagtatatgatgggtcgtgagactaagaccatggcaaaagttataaccaccgtactgaagttccctgatgatcagactcagaaaattttggaaagagaagatgctcggctgatgtttacttcacctcgcagtggtatcttctgagtaaaccatcagtctgtgcttagttaacatgtgtcatggctccgatcttcatcttgaagaagagtgacattgggtgactgctgcttggaaaactgtccacacttgctactctttgagaatgaagttgtcattcagggcccctcatgtagccaaaagaccaagaaaaatctggcccacagataagttgcagactgcctttaaaatagattttatcagtggagaaatggtgatagttttttcttcagttttctcttgggaagagttttatgttgtttaaaagatattttgataacttaacctgctttatgggcttacataatattcctttcatccattctttttaaagaacggcttacctttcctatttatttttagggtgattttttaaaaagacttgtgcaatacattttgaggtgaaacttagtggattttttctgataaattagagcatttaattgactattttattcaggttgatctgttgaatatttgctaaagaccagttctttaagctaagacatgtaaaaaatcccaaatggcagtacctcattgtttacttagcttttgtacttatatttttcagaggaaaaaacactactgtaaattgtgaatagccaatacataactgtattgtatgcaaatctgtgattgttggcagtgtcatctctgagaaacagataaataaagtttatttactatataacaaaaaaaaaaaaaaaa

SEQ ID NO: 117 - DNA, 3366 bp, Human
  HSP90AA1
gcatgcgtaggcgcgcggccgcggcggcggctggggagggttcttccggaaggttcgggaggcttctggaaaaagcgccgcgcgctgggcgggcccgtcgctatataaggcaggcgcgggggtggcgcgtcagttgcttcagcgtcccggtgtggctgtgccgttggtcctgtgcggtcacttagccaagatgcctgaggaaacccagacccaagaccaaccgatggaggaggaggaggttgagacgttcgcctttcaggcagaaattgcccagttgatgtcattgatcatcaatactttctactcgaacaaagagatctttctgagagagctcatttcaaattcatcagatgcattggacaaaatccggtatgaaagcttgacagatcccagtaaattagactctgggaaagagctgcatattaaccttataccgaacaaacaagatcgaactctcactattgtggatactggaattggaatgaccaaggctgacttgatcaataaccttggtactatcgccaagtctgggaccaaagcgttcatggaagctttgcaggctggtgcagatatctctatgattggccagttcggtgttggtttttattctgcttatttggttgctgagaaagtaactgtgatcaccaaacataacgatgatgagcagtacgcttgggagtcctcagcagggggatcattcacagtgaggacagacacaggtgaacctatgggtcgtggaacaaaagttatcctacacctgaaagaagaccaaactgagtacttggaggaacgaagaataaaggagattgtgaagaaacattctcagtttattggatatcccattactctttttgtggagaaggaacgtgataaagaagtaagcgatgatgaggctgaagaaaaggaagacaaagaagaagaaaaagaaaaagaagagaaagagtcggaagacaaacctgaaattgaagatgttggttctgatgaggaagaagaaaagaaggatggtgacaagaagaagaagaagaagattaaggaaaagtacatcgatcaagaagagctcaacaaaacaaagcccatctggaccagaaatcccgacgatattactaatgaggagtacggagaattctataagagcttgaccaatgactgggaagatcacttggcagtgaagcatttttcagttgaaggacagttggaattcagagcccttctatttgtcccacgacgtgctccttttgatctgtttgaaaacagaaagaaaaagaacaacatcaaattgtatgtacgcagagttttcatcatggataactgtgaggagctaatccctgaatatctgaacttcattagaggggtggtagactcggaggatctccctctaaacatatcccgtgagatgttgcaacaaagcaaaattttgaaagttatcaggaagaatttggtcaaaaaatgcttagaactctttactgaactggcggaagataaagagaactacaagaaattctatgagcagttctctaaaaacataaagcttggaatacacgaagactctcaaaatcggaagaagctttcagagctgttaaggtactacacatctgcctctggtgatgagatggtttctctcaaggactactgcaccagaatgaaggagaaccagaaacatatctattatatcacaggtgagaccaaggaccaggtagctaactcagcctttgtggaacgtcttcggaaacatggcttagaagtgatctatatgattgagcccattgatgagtactgtgtccaacagctgaaggaatttgaggggaagactttagtgtcagtcaccaaagaaggcctggaacttccagaggatgaagaagagaaaaagaagcaggaagagaaaaaaacaaagtttgagaacctctgcaaaatcatgaaagacatattggagaaaaaagttgaaaaggtggttgtgtcaaaccgattggtgacatctccatgctgtattgtcacaagcacatatggctggacagcaaacatggagagaatcatgaaagctcaagccctaagagacaactcaacaatgggttacatggcagcaaagaaacacctggagataaaccctgaccattccattattgagaccttaaggcaaaaggcagaggctgataagaacgacaagtctgtgaaggatctggtcatcttgctttatgaaactgcgctcctgtcttctggcttcagtctggaagatccccagacacatgctaacaggatctacaggatgatcaaacttggtctgggtattgatgaagatgaccctactgctgatgataccagtgctgctgtaactgaagaaatgccaccccttgaaggagatgacgacacatcacgcatggaagaagtagactaatctctggctgagggatgacttacctgttcagtactctacaattcctctgataatatattttcaaggatgtttttctttatttttgttaatattaaaaagtctgtatggcatgacaactactttaaggggaagataagatttctgtctactaagtgatgctgtgataccttaggcactaaagcagagctagtaatgctttttgagtttcatgttggtttattttcacagattggggtaacgtgcactgtaagacgtatgtaacatgatgttaactttgtggtctaaagtgtttagctgtcaagccggatgcctaagtagaccaaatcttgttattgaagtgttctgagctgtatcttgatgtttagaaaagtattcgttacatcttgtaggatctactttttgaacttttcattccctgtagttgacaattctgcatgtactagtcctctagaaataggttaaactgaagcaacttgatggaaggatctctccacagggcttgttttccaaagaaaagtattgtttggaggagcaaagttaaaagcctacctaagcatatcgtaaagctgttcaaaaataactcagacccagtcttgtggatggaaatgtagtgctcgagtcacattctgcttaaagttgtaacaaatacagatgagttaaaagatattgtgtgacagtgtcttatttagggggaaaggggagtatctggatgacagttagtgccaaaatgtaaaacatgaggcgctagcaggagatggttaaacactagctgctccaagggttgacatggtcttcccagcatgtactcagcaggtgtggggtggagcacacgtaggcacagaaaacaggaatgcagacaacatgcatcccctgcgtccatgagttacatgtgttctcttagtgtccacgttgttttgatgttattcatggaataccttctgtgttaaatacagtcacttaattccttggccttaaaa

SEQ ID NO: 118 - DNA, 3143 bp, Human
  MCM3
ctcgaggtaacctttggtggcgggaagagttcggaagttttcgcgccggggtggagtcatcctgggaacctccacgcgactttggtggaggtagttctttggcagcgggcatggcgggtaccgtggtgctggacgatgtggagctgcgggaggctcagagagattacctggacttcctggacgacgaggaagaccagggaatttatcagagcaaagttcgggagctgatcagtgacaaccaataccggctgattgtcaatgtgaatgacctgcgcaggaaaaacgagaagagggctaaccggcttctgaacaatgcctttgaggagctggttgccttccagcgggccttaaaggattttgtggcctccattgatgctacctatgccaagcagtatgaggagttctacgtaggactggaaggcagctttggctccaagcacgtctccccgcggactcttacctcctgcttcctcagctgtgtggtctgtgtggagggcattgtcactaaatgttctctagttcgtcccaaagtcgtccgcagtgtccactactgtcctgctactaagaagaccatagagcgacgttattctgatctcaccaccctggtggcctttccctccagctctgtctatcctaccaaggatgaggagaacaatccccttgagacagaatatggcctttctgtctacaaggatcaccagaccatcaccatccaggagatgccggagaaggccccagccggccagctcccccgctctgtggacgtcattctggatgatgacttggtggataaagcgaagcctggtgaccgggttcaggtggtgggaacctaccgttgccttcctggaaagaagggaggctacacctctgggaccttcaggactgtcctgattgcctgtaatgttaagcagatgagcaaggatgctcagccctctttctctgctgaggatatagccaagatcaagaagttcagtaaaacccgatccaaggatatctttgaccagctggccaagtcattggccccaagtatccatgggcatgactatgtcaagaaagcaatcctctgcttgctcttgggaggggtggaacgagacctagaaaatggcagccacatccgtggggacatcaatattcttctaataggagacccatccgttgccaagtctcagcttctgcggtatgtgctttgcactgcaccccgagctatccccaccactggccggggctcctctggagtgggtctgacggctgctgtcaccacagaccaggaaacaggagagcgccgtctggaagcaggggccatggtcctggctgaccgaggcgtggtttgcattgatgaatttgacaaaatgtctgacatggatcgcacagccatccatgaagtgatggagcagggtcgagtgaccattgccaaggctggcatccatgctcggctgaatgcccgctgcagtgttttggcagctgccaaccctgtctacggcaggtatgaccagtataagactccaatggagaacattgggctacaggactcactgctgtcacgatttgacttgctcttcatcatgctggatcagatggatcctgagcaggatcgggagatctcagaccatgtccttcggatgcaccgttacagagcacctggggagcaggatggcgatgctatgcccttgggtagtgctgtggatatcctggccacagatgatcccaactttagccaggaagatcagcaggacacccagatttatgagaagcatgacaaccttctacatgggaccaagaagaaaaaggagaagatggtgagtgcagcattcatgaagaagtacatccatgtggccaaaatcatcaagcctgtcctgacacaggagtcggccacctacattgcagaagagtattcacgcctgcgcagccaggatagcatgagctcagacaccgccaggacatctccagttacagcccgaacactggaaactctgattcgactggccacagcccatgcgaaggcccgcatgagcaagactgtggacctgcaggatgcagaggaagctgtggagttggtccagtatgcttactttaagaaggttctggagaaggagaagaaacgtaagaagcgaagtgaggatgaatcagagacagaagatgaagaggagaaaagccaagaggaccaggagcagaagaggaagagaaggaagactcgccagccagatgccaaagatggggattcatacgacccctatgacttcagtgacacagaggaggaaatgcctcaagtacacactccaaagacggcagactcacaggagaccaaggaatcccagaaagtggagttgagtgaatccaggttgaaggcattcaaggtggccctcttggatgtgttccgggaagctcatgcgcagtcaatcggcatgaatcgcctcacagaatccatcaaccgggacagcgaagagcccttctcttcagttgagatccaggctgctctgagcaagatgcaggatgacaatcaggtcatggtgtctgagggcatcatcttcctcatctgaggaggcctcgtctctgaacttgggttgtgccgagagagtttgttctgtgtttcccaccctctccctgacccaagtctttgcctctactcccttaacagtgttgaattcaactgaaggcgaggaatgttggtgatgaagctgagttcaggactcggtggaccctttgggaatgggtcatgaaagctgccatggggtgaggaaagaggagacagtgggagaggacaatgactattgcatcttcattgcaaaagcactggctcatccgccctacttcccatcccacacaaacccaattgtaaataacatatgacttctgagtacttttgggggcacaactgttttctgtttgctgtttttttgttttgttttttttctccagagcactttggtctagactaggctttgggtggttccaattggtggagagaagctctgaggcacgtcatgcaggtcaagaaagctttctttgcagtagcaccagttaaggtgaatatgtattgtatcacaaaacaaacccaatatccagatgaatatccgagatgttgaataaacttagccatttcgtacacatggtaaaaaaaaaaaaaaaaaaaaaaaaaaaaaaaa

SEQ ID NO: 119 - DNA, 6319 bp, Human
  MPHOSPH1
attgtttgaatttgaaaacggtaacatcgcagtgctgctcgcgggtctggctagtcaggcgaagtttgcagaatggaatctaattttaatcaagagggagtacctcgaccatcttatgtttttagtgctgacccaattgcaaggccttcagaaataaatttcgatggcattaagcttgatctgtctcatgaattttccttagttgctccaaatactgaggcaaacagtttcgaatctaaagattatctccaggtttgtcttcgaataagaccatttacacagtcagaaaaagaacttgagtctgagggctgtgtgcatattctggattcacagactgttgtgctgaaagagcctcaatgcatccttggtcggttaagtgaaaaaagctcagggcagatggcacagaaattcagtttttccaaggtttttggcccagcaactacacagaaggaattctttcagggttgcattatgcaaccagtaaaagacctcttgaaaggacagagtcgtctgatttttacttacgggctaaccaattcaggaaaaacatatacatttcaagggacagaagaaaatattggcattctgcctcgaactttgaatgtattatttgatagtcttcaagaaagactgtatacaaagatgaaccttaaaccacatagatccagagaatacttaaggttatcatcagaacaagagaaagaagaaattgctagcaaaagtgcattgcttcggcaaattaaagaggttactgtgcataatgatagtgatgatactctttatggaagtttaactaactctttgaatatctcagagtttgaagaatccataaaagattatgaacaagccaacttgaatatggctaatagtataaaattttctgtgtgggtttctttctttgaaatttacaatgaatatatttatgacttatttgttcctgtatcatctaaattccaaaagagaaagatgctgcgcctttcccaagacgtaaagggctattcttttataaaagatctacaatggattcaagtatctgattccaaagaagcctatagacttttaaaactaggaataaagcaccagagtgttgccttcacaaaattgaataatgcttccagtagaagtcacagcatattcactgttaaaatattacagattgaagattctgaaatgtctcgtgtaattcgagtcagtgaattatctttatgtgatcttgctggttcagaacgaactatgaagacacagaatgaaggtgaaaggttaagagagactgggaatatcaacacttctttattgactctgggaaagtgtattaacgtcttgaagaatagtgaaaagtcaaagtttcaacagcatgtgcctttccgggaaagtaaactgactcactattttcaaagtttttttaatggtaaagggaaaatttgtatgattgtcaatatcagccaatgttatttagcctatgatgaaacactcaatgtattgaagttctccgccattgcacaaaaagtttgtgtcccagacactttaaattcctctcaagagaaattatttggacctgtcaaatcttctcaagatgtatcactagacagtaattcaaacagtaaaatattaaatgtaaaaagagccaccatttcatgggaaaatagtctagaagatttgatggaagacgaggatttggttgaggagctagaaaacgctgaagaaactcaaaatgtggaaactaaacttcttgatgaagatctagataaaacattagaggaaaataaggctttcattagccacgaggagaaaagaaaactgttggacttaatagaagacttgaaaaaaaaactgataaatgaaaaaaaggaaaaattaaccttggaatttaaaattcgagaagaagttacacaggagtttactcagtattgggctcaacgggaagctgactttaaggagactctgcttcaagaacgagagatattagaagaaaatgctgaacgtcgtttggctatcttcaaggatttggttggtaaatgtgacactcgagaagaagcagcgaaagacatttgtgccacaaaagttgaaactgaagaagctactgcttgtttagaactaaagtttaatcaaattaaagctgaattagctaaaaccaaaggagaattaatcaaaaccaaagaagagttaaaaaagagagaaaatgaatcagattcattgattcaagagcttgagacatctaataagaaaataattacacagaatcaaagaattaaagaattgataaatataattgatcaaaaagaagatactatcaacgaatttcagaacctaaagtctcatatggaaaacacatttaaatgcaatgacaaggctgatacatcttctttaataataaacaataaattgatttgtaatgaaacagttgaagtacctaaggacagcaaatctaaaatctgttcagaaagaaaaagagtaaatgaaaatgaacttcagcaagatgaaccaccagcaaagaaagggtctatccatgttagttcagctatcactgaagaccaaaagaaaagtgaagaagtgcgaccgaacattgcagaaattgaagacatcagagttttacaagaaaataatgaaggactgagagcatttttactcactattgagaatgaacttaaaaatgaaaaggaagaaaaagcagaattaaataaacagattgttcattttcagcaggaactttctctttctgaaaaaaagaatttaactttaagtaaagaggtccaacaaattcagtcaaattatgatattgcaattgctgaattacatgtgcagaaaagtaaaaatcaagaacaggaggaaaagatcatgaaattgtcaaatgagatagaaactgctacaagaagcattacaaataatgtttcacaaataaaattaatgcacacgaaaatagacgaactacgtactcttgattcagtttctcagatttcaaacatagatttgctcaatctcagggatctgtcaaatggttctgaggaggataatttgccaaatacacagttagaccttttaggtaatgattatttggtaagtaagcaagttaaagaatatcgaattcaagaacccaatagggaaaattctttccactctagtattgaagctatttgggaagaatgtaaagagattgtgaaggcctcttccaaaaaaagtcatcagattgaggaactggaacaacaaattgaaaaattgcaggcagaagtaaaaggctataaggatgaaaacaatagactaaaggagaaggagcataaaaaccaagatgacctactaaaagaaaaagaaactcttatacagcagctgaaagaagaattgcaagaaaaaaatgttactcttgatgttcaaatacagcatgtagttgaaggaaagagagcgctttcagaacttacacaaggtgttacttgctataaggcaaaaataaaggaacttgaaacaattttagagactcagaaagttgaatgtagtcattcagccaagttagaacaagacattttggaaaaggaatctatcatcttaaagctagaaagaaatttgaaggaatttcaagaacatcttcaggattctgtcaaaaacaccaaagatttaaatgtaaaggaactcaagctgaaagaagaaatcacacagttaacaaataatttgcaagatatgaaacatttacttcaattaaaagaagaagaagaagaaaccaacaggcaagaaacagaaaaattgaaagaggaactctctgcaagctctgctcgtacccagaatctgaaagcagatcttcagaggaaggaagaagattatgctgacctgaaagagaaactgactgatgccaaaaagcagattaagcaagtacagaaagaggtatctgtaatgcgtgatgaggataaattactgaggattaaaattaatgaactggagaaaaagaaaaaccagtgttctcaggaattagatatgaaacagcgaaccattcagcaactcaaggagcagttaaataatcagaaagtggaagaagctatacaacagtatgagagagcatgcaaagatctaaatgttaaagagaaaataattgaagacatgcgaatgacactagaagaacaggaacaaactcaggtagaacaggatcaagtgcttgaggctaaattagaggaagttgaaaggctggccacagaattggaaaaatggaaggaaaaatgcaatgatttggaaaccaaaaacaatcaaaggtcaaataaagaacatgagaacaacacagatgtgcttggaaagctcactaatcttcaagatgagttacaggagtctgaacagaaatataatgctgatagaaagaaatggttagaagaaaaaatgatgcttatcactcaagcgaaagaagcagagaatatacgaaataaagagatgaaaaaatatgctgaggacagggagcgtttttttaagcaacagaatgaaatggaaatactgacagcccagctgacagagaaagatagtgaccttcaaaagtggcgagaagaacgagatcaactggttgcagctttagaaatacagctaaaagcactgatatccagtaatgtacagaaagataatgaaattgaacaactaaaaaggatcatatcagagacttctaaaatagaaacacaaatcatggatatcaagcccaaacgtattagttcagcagatcctgacaaacttcaaactgaacctctatcgacaagttttgaaatttccagaaataaaatagaggatggatctgtagtccttgactcttgtgaagtgtcaacagaaaatgatcaaagcactcgatttccaaaacctgagttagagattcaatttacacctttacagccaaacaaaatggcagtgaaacaccctggttgtaccacaccagtgacagttaagattcccaaggctcggaagaggaagagtaatgaaatggaggaggacttggtgaaatgtgaaaataagaagaatgctacacccagaactaatttgaaatttcctatttcagatgatagaaattcttctgtcaaaaaggaacaaaaggttgccatacgtccatcatctaagaaaacatattctttacggagtcaggcatccataattggtgtaaacctggccactaagaaaaaagaaggaacactacagaaatttggagacttcttacaacattctccctcaattcttcaatcaaaagcaaagaagataattgaaacaatgagctcttcaaagctctcaaatgtagaagcaagtaaagaaaatgtgtctcaaccaaaacgagccaaacggaaattatacacaagtgaaatttcatctcctattgatatatcaggccaagtgattttaatggaccagaaaatgaaggagagtgatcaccagattatcaaacgacgacttcgaacaaaaacagccaaataaatcacttatggaaatgtttaatataaattttatagtcatagtcattggaacttgcatcctgtattgtaaatataaatgtatatattatgcattaaatcactctgcatatagattgctgttttatacatagtataattttaattcaataaatgagtcaaaatttgtatatttttataaggcttttttataatagcttctttcaaactgtatttccctattatctcagacattggatcagtgaagatcctaggaaagaggctgttattctcatttattttgctatacaggatgtaataggtcaggtatttggtttacttatatttaacaatgtcttatgaattttttttactttatctgttatacaactgattttacatatctgtttggattatagctaggatttggagaataagtgtgtacagatcacaaaacatgtatatacattatttagaaaagatctcaagtctttaattagaatgtctcacttattttgtaaacattttgtgggtacatagtacatgtatatatttacggggtatgtgagatgttttgacacaggcatgcaatgtgaaatacgtgtatcatggagaatgaggtatccatcccctcaagcatttttcctttgaattacagataatccaattacattctttagatcatttaaaaatatacaagtaagttattattgattatagtcactctattgtgctatcagatagtagatcattctttttatcttatttgtttttgtacccattaaccatccccacctccccctgcaaccgtcagtacccttaccagccactggtaaccattcttctactctgtatgcccatgaggtcaattgattttatttttagatcccataaataaatgagaacatgcagtctttgtcaaaaaaaaa

SEQ ID NO: 120 - DNA, 5485 bp, Human
  PARP4
cgcccgcccagccccgggggcagggagagcctagattacggaagtaccgcgagcaaggagcgcggaatcggggagcgtccggagctagctggatcctctaggcaggatggtgatgggaatctttgcaaattgtatcttctgtttgaaagtgaagtacttacctcagcagcagaagaaaaagctacaaactgacattaaggaaaatggcggaaagttttccttttcgttaaatcctcagtgcacacatataatcttagataatgctgatgttctgagtcagtaccaactgaattctatccaaaagaaccacgttcatattgcaaacccagattttatatggaaatctatcagggaaaagagactcttggatgtaaagaattatgatccttataagcccctggacatcacaccacctcctgatcagaaggcgagcagttctgaagtgaaaacagaaggtctatgcccggacagtgccacagaggaggaagacactgtggaactcactgagtttggtatgcagaatgttgaaattcctcatcttcctcaagattttgaagttgcaaaatataacaccttggagaaagtgggaatggagggaggccaggaagctgtggtggtggagcttcagtgttcgcgggactccagggactgtcctttcctgatatcctcacacttcctcctggatgatggcatggagactagaagacagtttgctataaagaaaacctctgaagatgcaagtgaatactttgaaaattacattgaagaactgaagaaacaaggatttctactaagagaacatttcacacctgaagcaacccaattagcatctgaacaattgcaagcattgcttttggaggaagtcatgaattcaagcactctgagccaagaggtgagcgatttagtagagatgatttgggcagaggccctgggccacctggaacacatgcttctcaagccagtgaacaggattagcctcaacgatgtgagcaaggcagaggggattctccttctagtaaaggcagcactgaaaaatggagaaacagcagagcaattgcaaaagatgatgacagagttttacagactgatacctcacaaaggcacaatgcccaaagaagtgaacctgggactattggctaagaaagcagacctctgccagctaataagagacatggttaatgtctgtgaaactaatttgtccaaacccaacccaccatccctggccaaataccgagctttgaggtgcaaaattgagcatgttgaacagaatactgaagaatttctcagggttagaaaagaggttttgcagaatcatcacagtaagagcccagtggatgtcttgcagatatttagagttggcagagtgaatgaaaccacagagtttttgagcaaacttggtaatgtgaggcccttgttgcatggttctcctgtacaaaacatcgtgggaatcttgtgtcgagggttgcttttacccaaagtagtggaagatcgtggtgtgcaaagaacagacgtcggaaaccttggaagtgggatttatttcagtgattcgctcagtacaagtatcaagtactcacacccgggagagacagatggcaccagactcctgctcatttgtgacgtagccctcggaaagtgtatggacttacatgagaaggacttttccttaactgaagcaccaccaggctacgacagtgtgcatggagtttcgcaaacagcctctgtcaccacagactttgaggatgatgaatttgttgtctataaaaccaatcaggttaaaatgaaatatattattaaattttccatgcctggagatcagataaaggactttcatcctagtgatcatactgaattagaggaatacagacctgagttttcaaatttttcaaaggttgaagattaccagttaccagatgccaaaacttccagcagcaccaaggccggcctccaggatgcctctgggaacttggttcctctggaggatgtccacatcaaagggagaatcatagacactgtagcccaggtcattgtttttcagacatacacaaataaaagtcacgtgcccattgaggcaaaatatatctttcctttggatgacaaggccgctgtgtgtggcttcgaagccttcatcaatgggaagcacatagttggagagattaaagagaaggaagaagcccagcaagagtacctagaagccgtgacccagggccatggcgcttacctgatgagtcaggatgctccggacgtttttactgtaagtgttggaaacttaccccctaaggctaaggttcttataaaaattacctacatcacagaactcagcatcctgggcactgttggtgtctttttcatgcccgccaccgtagcaccctggcaacaggacaaggctttgaatgaaaaccttcaggatacagtagagaagatttgtataaaagaaataggaacaaagcaaagcttctctttgactatgtctattgagatgccgtatgtgattgaattcattttcagtgatacacatgaactgaaacaaaagcgcacagactgcaaagctgtcattagcaccatggaaggcagctccttagacagcagtggattttctctccacatcggtttgtctgctgcctatctcccaagaatgtgggttgaaaaacatccagaaaaagaaagcgaggcttgcatgcttgtctttcaacccgatctcgatgtcgacctccctgacctagccagtgagagcgaagtgattatttgtcttgactgctccagttccatggagggtgtgacattcttgcaagccaagcaaatcgccttgcatgcgctgtccttggtgggtgagaagcagaaagtaaatattatccagttcggcacaggttacaaggagctattttcgtatcctaagcatatcacaagcaataccatggcagcagagttcatcatgtctgccacacctaccatggggaacacagacttctggaaaacactccgatatcttagcttattgtaccctgctcgagggtcacggaacatcctcctggtgtctgatgggcacctccaggatgagagcctgacattacagctcgtgaagaggagccgcccgcacaccaggttattcgcctgcggtatcggttctacagcaaatcgtcacgtcttaaggattttgtcccagtgtggtgccggagtatttgaatattttaatgcaaaatccaagcatagttggagaaaacagatagaagaccaaatgaccaggctatgttctccgagttgccactctgtctccgtcaaatggcagcaactcaatccagatgtgcccgaggccctgcaggccccagcccaggtgccgtccttgtttctcaatgatcgactccttgtctatggattcattcctcactgcacacaggcaactctgtgtgcactaattcaagagaaagaatttcgtacaatggtgtcgactactgagcttcagaagacaactggaactatgatccacaagctggcagcccgagctctaatcagagattatgaagatggcattcttcacgaaaatgaaaccagtcatgagatgaaaaaacaaaccttgaaatctctgattattaaactcagtaaagaaaactctctcataacacaatttacaagctttgtggcagttgagaaaagggatgagaatgagtcgccttttcctgatattccaaaagtttctgaacttattgccaaagaagatgtagacttcctgccctacatgagctggcagggggagccccaagaagccgtcaggaaccagtctcttttagcatcctctgagtggccagaattacgtttatccaaacgaaaacataggaaaattccattttccaaaagaaaaatggaattatctcagccagaagtttctgaagattttgaagaggatggcttaggtgtactaccagctttcacatcaaatttggaacgtggaggtgtggaaaagctattggatttaagttggacagagtcatgtaaaccaacagcaactgaaccactatttaagaaagtcagtccatgggaaacatctacttctagcttttttcctattttggctccggccgttggttcctatcttcccccgactgcccgcgctcacagtcctgcttccttgtcttttgcctcatatcgtcaggtagctagtttcggttcagctgctcctcccagacagtttgatgcatctcaattcagccaaggccctgtgcctggcacttgtgctgactggatcccacagtcggcgtcttgtcccacaggacctccccagaacccaccttcttcaccctattgtggcattgttttttcagggagctcattaagctctgcacagtctgctccactgcaacatcctggaggctttactaccaggccttctgctggcaccttccctgagctggattctccccagcttcatttctctcttcctacagaccctgatcccatcagaggttttgggtcttatcatccctctgcttcctctccttttcattttcaaccttccgcagcctctttgactgccaaccttaggctgccaatggcctctgctttacctgaggctctttgcagtcagtcccggactaccccagtagatctctgtcttctagaagaatcagtaggcagtctcgaaggaagtcgatgtcctgtctttgcttttcaaagttctgacacagaaagtgatgagctatcagaagtacttcaagacagctgctttttacaaataaaatgtgatacaaaagatgacagtatcctgtgctttctggaagtaaaagaagaggatgaaatagtgtgcatacaacactggcaggatgctgtgccttggacagaactcctcagtctacagacagaggatggcttctggaaacttacaccagaactgggacttatattaaatcttaatacaaatggtttgcacagctttcttaaacaaaaaggcattcaatctctaggtgtaaaaggaagagaatgtctcctggacctaattgccacaatgctggtactacagtttattcgcaccaggttggaaaaagagggaatagtgttcaaatcactgatgaaaatggatgacgcttctatttccaggaatattccctgggcttttgaggcaataaagcaagcaagtgaatgggtaagaagaactgaaggacagtacccatctatctgcccacggcttgaactggggaacgactgggactctgccaccaagcagttgctgggactccagcccataagcactgtgtcccctcttcatagagtcctccattacagtcaaggctaagtcaaatgaaactgaattttaaactttttgcatgcttctatgtagaaaataatcaaatgataatagatacttataatgaaacttcattaaggtttcattcagtgtagcaattactgtctttaaaaattaagtggaagaagaattactttaatcaactaacaagcaataataaaatgaaacttaaaataaaaaaaaaaaaaaaaa

SEQ ID NO: 121 - DNA, 6947 bp, Human
  PHF3
gggctgaaagacacacagaagtcttcatggatatagttgatacatttaatcatttaattcctactgaacacttagatgatgccctatttctaggatccaacctggagaatgaagtctgtgaggattttagtgcaagtcaaaatgtcttagaggactcgctgaagaacatgctcagcgataaggatcctatgctaggatctgcaagtaaccagttctgtttgcctgttttggatagcaatgatcccaatttccagatgccttgttcaacagttgttggtcttgacgatattatggatgaaggagttgttaaagaaagtggcaatgataccattgatgaagaagaactgattttacctaacaggaacttaagggacaaggtagaagaaaattcagtgagatctccaagaaaatcacctcgtttaatggcacaagaacaagtaagaagtttgcgacagagcactattgccaagcgttcaaatgcagcaccattaagtaacacaaaaaaagcatctgggaagactgtatctactgctaaagcaggagtgaaacaaccagaaaggagtcaggttaaagaagaagtatgtatgtcactgaaacctgagtaccataaggagaatagaaggtgcagccgaaatagcggacaaattgaagtggtacctgaagtatcagtgtcttcaagtcattcttcagtgtcatcttgtcttgaaatgaaggatgaagatggattagattctaagcataagtgtaataatccgggagaaatagatgtgccatctcatgaattaaattgttcacttctttcagagacttgtgttactattggagaaaagaaaaatgaagctttgatggaatgtaaagccaagcctgttggtagtccattgtttaagttttcagataaagaagaacatgaacaaaatgattccatttcaggtaaaacgggtgagactgttgttgaagaaatgatagcaacaagaaaagttgaacaagattcaaaggagacagtaaaattatcccatgaagatgaccatattcttgaggacgctggatcttctgatatttctagtgatgctgcttgtacaaatccaaataagacagaaaacagccttgtaggtttgcctagttgtgtagatgaagtgactgaatgtaatttggaattgaaggataccatgggtattgctgataaaactgagaacacccttgaaagaaataaaattgaaccgttgggttattgtgaagatgcggagtctaataggcagttggagagcactgagtttaataaatcaaacttagaggtggttgatactagtacttttggaccggaaagtaatatcttggaaaatgctatttgtgatgtgcctgaccaaaattcaaaacagttgaatgctatagaaagtactaaaatagagtcccatgaaacagcaaaccttcaggatgacagaaacagccagtcaagtagcgtttcttacttagagtcaaaaagtgtaaaatccaaacatacaaaacctgtaattcattctaagcaaaacatgaccacagatgctccgaagaaaattgttgcagcaaagtatgaagtaatacatagcaaaactaaagttaatgtcaaaagtgtgaaacgaaatactgatgtaccagaatctcagcaaaattttcataggccagtcaaagtcagaaaaaaacaaattgataaggagccaaagattcagagttgcaattctggggttaaatctgtgaaaaaccaagctcattctgtactgaaaaaaacattacaggatcaaactttagtacaaattttcaagcccttaactcattctttgagtgataagtcacacgctcatcctggttgcttgaaagaacctcatcatcctgcacaaactggacatgtatcacattctagccagaaacagtgtcataagcctcagcaacaggccccagcaatgaaaaccaatagtcacgtgaaggaagagcttgaacacccaggcgttgagcattttaaggaagaggataaactgaaactgaaaaaacctgagaagaacctacaaccccgccaaagaagaagcagcaaaagtttttctttagatgagccaccattgttcattccagataacatagctaccataagaagagaaggctctgatcatagctcctcatttgaaagcaaatatatgtggactcccagcaagcagtgtgggttttgcaaaaaaccacatggcaacaggtttatggttggctgtgggagatgtgatgactggtttcatggtgattgtgttgggttaagtctttctcaagcacagcagatgggcgaggaagacaaagaatatgtctgtgtaaaatgttgtgctgaagaagacaaaaagactgaaatactagatccagatactttggaaaaccaagctacagttgaattccatagtggagataaaacaatggagtgtgaaaagcttggattatcaaaacacacaacaaatgatagaaccaaatatatagatgatacagtgaagcacaaggtcaaaattttaaaacgggagtctggtgaaggcagaaattcatcagactgtagagataatgaaattaaaaaatggcagctagctcctcttcgtaagatgggacaaccagttttacctcggagatcctcagaagaaaaaagtgaaaaaataccgaaagagtctacaactgttacttgcacaggagaaaaagcttcaaaaccaggtactcatgagaagcaagagatgaaaaagaagaaagttgaaaaaggagtgcttaatgtacatcctgctgcttctgcttccaagccttctgcagatcagatcaggcaaagtgtcagacattctctcaaagacattcttatgaagagacttacagactcaaatttgaaggtaccagaggaaaaggcagcaaaagttgccacaaaaattgagaaagagcttttctctttttttcgggacacagatgctaaatataagaacaaatatagaagtttgatgtttaatttgaaagatcctaaaaacaatatattatttaaaaaagtactgaaaggagaagtaactcctgatcatcttatcagaatgagtccagaagaactagcttctaaagagttagctgcttggagacgaagagaaaacagacataccatagaaatgattgagaaagagcagagagaagtggaacgacggccaatcaccaaaataactcataaaggtgaaatagaaattgagagtgatgccccaatgaaagaacaggaagcagccatggagattcaggaaccagccgccaataagtcattggagaagccagaaggatctgaaaaacaaaaagaggaggttgactctatgtctaaagataccactagtcaacacagacagcatctttttgatctcaactgcaaaatctgcataggtcgaatggcaccacctgtagatgatctttctccaaaaaaagtaaaagttgttgtaggagtagctcgcaaacattcagacaatgaagcagaaagtatagcagatgcattatcttcaacctcaaatattttggcttctgaattctttgaggaggagaaacaggagtctccaaagtcaacgttctctcctgctccacgtccagagatgcctggaactgttgaagttgagtctacctttctggctcgattgaacttcatctggaaaggttttatcaacatgccttctgtggcaaaatttgttaccaaagcctatccagtatctggctccccagaatacctgacagaggacctaccagatagtattcaagtaggtggcaggatatcacctcagacagtttgggattatgtggaaaaaataaaagcatcaggaaccaaggaaatttgtgtggttcgcttcacaccagtaactgaagaagatcaaatttcttatactttgctctttgcatacttcagtagcagaaagcgctatggagtagctgctaacaacatgaagcaggttaaagatatgtaccttattcctttgggtgccacagataaaattccacaccctcttgtgccttttgatggacctgggcttgaactgcatagacctaatctattgttgggcttaattattcgtcagaaactgaagcgacagcacagtgcctgtgctagtactagtcatatagctgagactcctgaaagtgcaccaccaatagcattgccacctgataaaaaaagtaaaatagaagtttctacagaagaagcaccagaggaagaaaatgacttttttaattcttttacaactgtattacacaagcagagaaataaacctcagcagaatcttcaggaagaccttccaacagcagttgaacctttaatggaagtcaccaaacaggagccaccaaaacctttaagatttcttcctggcgtgttgattggctgggagaatcaacctactactctggaattagcaaataaacctcttcctgtggatgatatacttcaaagccttttgggcaccactggtcaagtatatgaccaggcccagtcagtgatggaacaaaacactgttaaagaaattccatttttaaatgagcagaccaactcaaaaatagagaaaacagataatgtggaagtaactgatggtgaaaacaaggagataaaagttaaagtagataatatttcagaatctacagataagtcagcagaaatagaaacatcagtagtagggtcctcttccatttctgcagggtctttgacgagtcttagtctcagaggtaagccaccagatgtttctacagaagcatttttaacaaatttatcaattcagtcaaaacaagaggaaactgtggagagtaaagagaaaacattaaaaagacagcttcaggaagatcaagagaataatttgcaagataaccagacttcaaatagttctccatgcagatctaatgtaggaaaaggaaacatagatggtaatgtgagctgtagtgaaaaccttgttgctaatacagcgaggtctccacagtttatcaacctgaaaagggatcctaggcaagcagcaggacgaagtcagcctgtaactacttcagaaagcaaagatggagatagttgccggaatggagaaaaacacatgctgcctggcctgtcacacaacaaggagcacttaacagaacaaatcaatgtagaggaaaagttgtgttctgcagagaaaaactcgtgtgttcagcagagtgacaatttaaaagttgcacaaaactcaccatcagtagaaaacatacagacttctcaagcagaacaagcaaaacccttacaggaggatattttaatgcaaaatattgaaactgtgcacccatttcgaagaggatcagcagtagcgacatctcattttgaagttggaaacacatgtccatcagaatttccttctaaaagcatcacctttacttccagaagcaccagccccagaacaagtacaaacttttcacccatgaggccacagcagcccaaccttcagcatctcaagtctagcccacctggatttccatttccagggcctcctaattttcccccacaaagcatgtttggatttccaccacatttgccacctccattacttccccctccaggctttggctttgctcaaaatcccatggttccctggccacctgttgttcatctcccaggtcagccacagcgtatgatgggtcctctctcacaagcatcaaggtatataggcccgcagaatttttaccaggttaaagacattcggaggccagaaaggcgccatagtgacccttggggtaggcaagaccaacagcaactggataggccatttaataggggtaaaggggaccgccagagattttatagtgattcacaccatttgaaaagagagcgacatgaaaaggaatgggagcaagaatctgaaaggcatagacgcagagacagaagccaagacaaggacagagacagaaaaagcagggaggaagggcacaaagataaagagagggcacggttatcacatggtgatcgaggaacagatggaaaagcaagcagagatagtaggaatgtagacaagaagccagataaacctaaaagtgaagactatgagaaggacaaagaacgagagaaaagtaaacacagagaaggagaaaaggacagggataggtaccacaaagatagggaccacactgacagaactaaaagcaaaaggtaaaatttgcaggctgcttcaggattacatttaaataactgttaaaatgttgtatcttgtaaacaaaagaaagattgcctgctaggattgtgccatctttaaaatttttactattggtcatttgcagaacagtaaattctgtgtgttggtacagagtgctctgtaccagtgctcatcatcccttcttcataccaacggtccctagttataggaatttaatatttttaaaagttttacattgctgtatattcaaagatttgttttattaatatgcaataaaggcttagaaattttagttttattccttaattggtaaatatggttaactatggaatatatttacttcctctagtgaatgtcctttatataatgactaatttgggagtaatgtgtgctctgtaagtttgttttaaattgcactgtttttaaagaaactgtagaggagcaacaaaaatccaagcaacttcataatcagattatgctaatcatttagttgagcagtttttgaccaagaatcagaagcccaaggggtacatttattgctttaatctgcactcattgaagtcatttattaccatatactacagctttgtggtaggccattattttcattttcatttttggctcttcagaaacttgaatacttaagcttgtacatgatcttgtgttttgctatcctttttactgtaaaatgtaaatattttaagggatattttgattctaaatatgataaaataatttctcacctattttgtgtgtgtgacttgaaattcagtagtaaaagaatttcttctttaaagcttt

SEQ ID NO: 122 - DNA, 9705 bp, Human
  PPP1R9A
ctctcccgggattttgctgccgggctccctctctctgcggccctagagttaatcccatcagccgagatgaacctctagtcttgctttgaaaaaatcattctgtgtaactcttgactgtgactaagttcctaatacacctgttgggacgatcactgacaccgtataccatttgagaggtacttttcttgacccaatactggtgattagagaagagaggtatcttggtttttggtttttttctttgatcattatgaacattggcttttcacccctgaagtgaaaatgttgaaaactgagtcttcaggtgaacgaaccactctcagaagtgcctctcctcacaggaatgcatatcgaactgagtttcaggcactgaaaagtacctttgacaaacccaagtcagatggggaacaaaaaacaaaagaaggtgagggctcccagcagagcagggggaggaaatatggctccaatgtcaacagaattaaaaacctatttatgcagatgggtatggaacccaacgagaatgctgcagtcattgccaaaacaagggggaaaggtggacattcatctcctcagagaagaatgaagcccaaagaatttctggaaaaaacagatggctcagttgttaagttggagtcttctgtttctgaacgaattagtagatttgacactatgtacgatggcccttcatattccaagttcactgagactcgaaagatgtttgagagaagtgtgcatgaatcaggacagaacaaccgctattccccaaagaaagagaaagctggagggagtgaacctcaggatgaatggggaggttccaagtccaacagaggcagtactgattccttggacagccttagctcccgaactgaggctgtctccccaactgtgagtcaactgagtgcagtatttgagaacactgattctcccagtgccatcatttctgagaaggctgaaaacaatgaatactcagtgactgggcattatcccttgaatttaccatctgttactgttacaaatcttgacacatttggtcacctgaaggattctaattcctggcctccttcaaacaagcgaggtgttgatacagaggatgctcacaagagtaatgcaactccagtaccagaagtggcttctaaaagtacctctctagcttcgatacctggtgaagagatccagcagagcaaggaacccgaggactccacatctaatcaacagactcccgacagcattgacaaagatggtcctgaagaaccttgtgctgaaagtaaggcaatgccaaagtccgaaatcccttcaccacaaagccaactgttagaagatgctgaagctaatttggttggaagggaggcagcaaagcaacagaggaaagaacttgcaggtggtgatttcacctctcctgatgcttctgcatccagttgtggaaaagaagtacctgaagattcaaataattttgatggttcccatgtgtacatgcacagtgactataatgtgtatagggtgagatccaggtataattcagactggggagagacaggcactgagcaggatgaggaggaagatagtgatgagaacagttactatcagcctgatatggagtactcggaaattgttggattgccagaagaagaagaaatcccagcaaataggaaaattaagtttagtagtgctcctattaaggttttcaacacatactccaatgaagactatgacaggagaaatgacgaagttgaccctgtggctgcttcagctgagtatgaacttgaaaaacgtgtagaaaagctggaacttttcccagtggagctagagaaagatgaggatggtcttggtataagtattattggaatgggtgttggagcagatgctggacttgaaaagctgggaatattcgtcaagacagtaacagaaggtggtgctgctcaacgggatggcagaatacaagtcaatgaccagattgtggaagtggatggaatcagcttggtgggtgtgacacagaattttgcagcaacagttctcagaaacaccaagggcaacgtcagatttgttattgggcgggaaaaaccaggacaagtgagcgaggttgcccagttgataagccagacactggaacaggagaggcgccagagagagctgctggaacagcactatgcccagtatgatgccgacgatgacgagacaggagaatatgccacagatgaagaagaagatgaggtaggacctgtccttcctggcagcgacatggccattgaagtctttgagctgcctgagaatgaggacatgttttccccatcagaactggacacaagcaagctcagtcacaagttcaaagagttgcaaatcaaacatgcagttacagaagcagagattcaaaaattgaagaccaagctgcaggcagcagaaaatgagaaagtgaggtgggaactagaaaaaacccaactccaacaaaacatagaagagaataaggaaagaatgttgaagttggaaagctactggattgaggcccaaacattatgccacacagtgaatgagcatctcaaagagactcaaagccagtatcaggccttggaaaagaaatacaacaaggcaaagaagttgatcaaggattttcaacaaaaagagcttgatttcatcaaaagacaggaagcagaaagaaagaaaatagaagatttggaaaaagctcatcttgtggaagtgcaaggcctccaagtgcggattagagatttggaagctgaggtattcaggctactgaagcaaaatgggactcaagttaacaataataacaacatctttgagagaagaacatctcttggtgaagtctctaaaggggataccatggagaacttggatggcaagcagacatcttgccaagatggcctaagtcaagacttgaatgaagcagtcccagagacagagcgcctggattcaaaagcactgaaaactcgagcccagctctctgtgaagaacagacgccagagaccctctaggacaagactgtatgatagtgttagttccacagatggggaggacagtctagagagaaagaattttaccttcaatgatgacttcagtcccagcagtaccagttcagcagacctcagcggcttaggagcagaacctaaaacaccagggctctctcagtccttagcactgtcatcagatgagagcctggatatgatagatgacgagatccttgatgatggacagtctcccaaacacagtcagtgtcagaatcgggccgttcaggaatggagtgtgcagcaggtttctcactggttaatgagcctaaatctggagcagtatgtatctgaattcagtgcccaaaacatcactggagaacagctcctgcagttggatggaaataaacttaaggctcttggaatgacagcatcccaggaccgagcagtggtcaaaaagaaactcaaggaaatgaagatgtctctagagaaggctcggaaggcccaagagaaaatggaaaaacaaagagaaaagctaaggagaaaggagcaagagcaaatgcagaggaagtccaaaaagacagaaaagatgacgtcaactacagccgagggtgctggtgagcagtaacacataccctcttacagatgatggagatgctccaagagaagtccccacctcttcctgccctgctctcctccagaggatgaaaaagaaactaaatgataagggtaatgcggctctaggccggctgaggaactgtgtgttgaataactgcattttctgcaatagaatgcactcttaattttaactactaaaataatcccaagccacctttggttcattaacaaaccagagatttcatttaagtagctgtgttttgctcttctctaacttaccaacatcttgtgttgtgttgggtgtgttttgtcacttggagaactagtgtgaccccacccaagagcatgacacaccctggtgttgttaatggagcgccgtgaattttcagtgtgggatcctgaaatggcaattgcacatgtctgcatggcagagagcaccctgccatgagatctgagaccagtacttaacttctaggactgcaacacctactccaatgtgtgggaaagatttgctcttaattctcagtctggacagtgagaccaccccgctgtggaaacatgggtgctctgctctgtagttacctactaagggaaaaggcaagcaagtcattctgcttgctaggcatcaaaaagaaagaaaataaattatagctatttgttaaccactgaaaaaagcaaaagccttaagaatgtggatgtgggtattaccttggggttctgagggtaatatttatcctctagatacggctgaacaagaaagaaaaaaatcagacattaatgcagccatgggatattgggatctgttgaccttgctactgctgtgtgttcagcatttcagcaacactggcaaacacaacacagttcctcttccccctacctaacccaagaaattgaacaggaaattgatttttaaggaaaccaccattttcaggtttcctctcctggggaacattctggctggtcttcagcctgcctatgtcacaatcaggaactcatcacatattttctactcaagatttcccaggtgggctcagttagtattttaacaaatgtacttttaagaaaaatagaaataccagttagaggaaactgtcagttaacattttagagagattttgaatggtttttccgaaccattcctttccatacttcaaagattctcaattttacagaaaaagtttgtttaaggcagtgcataggtatactttagtagtggaggaacttatactaattttaagccagcattaaggatttccatgtttcaccaaactaagtcaagtgcaggagactggggcagaagaaggagaaaataaactcgttttgagaaatttcatgtgatgagggttttttgttttttatgctcatgtatctggttctctttgctgcgttgactctaaaaatgaggttatccactttccaaaggacaagtttcagaataagacttgaggccacatgaattcttggacagtattttacttcttttactttatgggaatctctgctctgttcccagcatctcgtatcttccactagaagtattccatatttagagcctcggcaaggcttttgagtgtaacagattaagggaactcccttgtagccccatcttgtattttaataacagtgtgatttttttttatctgaaaatctgaattcagaaattatctaaactggacatttttaattctgttttacccccaaggcctgttttcttttcattgccagagtattgtcggttatgcgtcagctcttttgtcattaggtacagacccttcattcaatcctcagaaacgttgacatgaagtaacattgtgttttacagttatcaaagtcaccattatgtttttctgtctgtcttcattaggggtatgataatgaaactgccgtattggatactctattaatgtcttgagatgtctggtgctttgttattttttcacatcatgagaaataagaagccactattaatgagtgatacaatttggcaaaacttttcaaatactaaaacactaaattagtaaaaatctggtaatattagtgcttgctattgtaaatttttgccatttttgcttatctttgggaaaaaagtgacctggatcacactggaagtttcactgtattcaagagtagaaatagaaggatgattatcttaagttatgtttacactttggtaatatttgaaaatggatgtatatactggaaatgtctgtaagtgtcttgtttttgcacctaatttatgatctattatattgcattttcttaaatatcttagaagtatttttctttataactttgtatattgaatgtttagataaatgtccaactgacaatgttataaatcaaattcttattcctaaaatcatttagtattataagtattttgattttttaagttaaattatagtaattttaggccgaagtgagttattttaacattaccacttaaaacggatgaaattgtaaaagtcatttggtttgattgccccacaaagcataagatgtaaactgattaagggtatgaaagcaaagtgaaagacctcagatcttgtgcacattttgttttcctattatttcttttattgactgtagtgcatgatacctaatcaaggctccaatgtcttgcacaattcctactttaatgctagtggttttcagtgtccttacaatttaacacagaattgttatttcatcaaccttaaaaactgcagtttttattatcagaaaatgaacaaaaagggaatatctggttgctatgaactgattccctaaaggagagctcagtatgattctaacaatagccaaaagtgttttggggtataggttatgctttgttgggagggaatgtgtggtgaggaggccaagctgcagacagaaagcattgtatgagctgtatctgggtcagggtttcccattaaaggatgttagttttataacagattactttgtttaagaccatctcccttcaagtaactcacagtttatgtaatactaatctcattctttttttacctgaatcaggaattttctgcagaatgttaagttagggaagaaacctcatttcatccattctaacactcctgatgaagtccccctttagtttcatgacaataaagctgttctgtggctatcatcctttagctgggattgacaattgatttcacaccctcaacatcacaagctttttttaacccacagcagttcatgattgcagtatgataggtactaaagccaaactcagctttcaactggcacaaaatgggactgtcaccttttgctccattgttgttggaaacaaagtggcaagagggaaaatgaggaaccagatttacctttgccactatctgtgaccctgtaatcatcactagcctgaaatcttaaaatatcccagtcccaagctacaaaaatggtcacaggtggtttgatctagcacctcggccgttagagtttgtgctgaagacaaatttgtctgggttcattgtgcaccagaattagcatgtgcttgaaaattgcattttataaaagggaaatgaaaatttgcatttatatagatactctgattcatgtttaagtgttaaaggttatgcagactaaacttcaagaggagatccagtgtttaacaatagtgttctagaggattctaaaggaagctgccccagcagccctgagagaaccatctatactttggatatgttgtagccccatcattacactgagatatttccatttgagtaactaaaggtactcctgacagagctggagatgaggggcattttggtgggcagtggtcactagggttcacgtcacctacttaatgcaaagaccttagtggtctcagaatgaaaaggtaaaatggaagagaaaagcacagtcctttcctgtcttttcaaatttactttttattaaggatgtacctgtgcactattctaaagctaagcatttaaggataaagtccagaaataaaatgtccatattttcttttcttttctttttttttttttttttctgtcatctgtcacccagactggactgcagtggtgccatcatgtcttactgcagcctcaaactcctgggctcaagtggtcctcctgcttcagcttcccaagtagctgggactacaggcatgtgccaccacccccagccaaaacatccatattttctattagaatggtttacattatgatgggggatggggagctgggggagggctgtacattcccaaaagaaagtagtgttataggaaatccaaatgcgcttcagtgattcactcctgaaaagcagcctgggtatgttggcagattttgtttgcatttgtcttgcgtatttaaagtctcaggaaatctagtcttggtccaaaacactggagaaaaaaataacaccagacaaaacacatttgagtaacttgaagtagcagcatagaataggcccaactaagaagttggaggggcaaagagaaagccgacagaatcagcttctcctggaaagtgaaagcatcaagttctatttatggtagacagagggtccttatttgcttgtccgtggtgtctatgtgggcctattgagggaatggtagttacttgaaggttcacatatgtaagcgtgtggacccagcacagtctgtgacctgattccagatcctcaagagtggagaaggaaagaaatatgatgatttcctatgcttgaccctaacccaaccccaaaactgctagggattcaacagtgagtaagatgtatgcaataagagaacagataacttctcaacaatgtgcatgccgtttgtgtagatgttcagaactacatatgtgtgaatatcactcccaccttacacacgcacacacactgcaatcacatggcattaaaaaatatattgtgtatggaacttggcgaggtcagtcaggacctggagctgtaatcatagccttattgccacttcttgcgttgtgtatacattgaatggctcatagattttaagagatttttttattgtaagtatttctactaaatgcacttatccttctatatgtttatatattttggtaaaattgatttatcagatacttggtattttagtaagaaaatttcctcaaatatttggctaatgctttgatgtcaagattgcatattgctgagttggagctcagaagaaatgtatgcagctaaaaattgcactgtgtgttcttgtgaatttgctcacaattctaaaatgacataattggtggctgtgatgcttacagtcactgcctactggctctcttatgatgaatgttgccatcatatgatcatttatttactttttgtgcaagcaatggcattttggttgttgccaaaaacaacacaagtggttgggagtgtatgttgttggaaggtgtacacttctgtttctttcagctgtattatttatacacccaggttttctgttaaggatgtaatcattcattcaagaaagaacaattggcaagaaataattaaattaccttaaaaagaattaagaggcactccagccagataacacctcccaacaacatgaaatttagttagtgcttagtgaaattccttaaatatatatgtatatgttttcttcaacattatttaatataactactgcttttatattttttaatggtgttgcaaccacttgtacacctgctacaccttactgacaaaactgggcagctgaaaataaaagagaataaattctattccactgtaagaagttgatttcttttcagctttctttgtatatcagtaaagaacacgaattgtttgaaaataattttaagtctgataagtatggatagcatgttacctaagcttttaatttgtacattttgatgtctgatcatttgcatggaagagacaatagtgccacgtctgaattgttctcttgtgcttggttaatatgtacttctctagattgttcaaaaagtttcaaatgacattccttactctttggttttcagaggcattcaagcaaaatatcacagtggtcttttgttttctgaccaatctaacaatacctgtgattaaatttaatttgttagtgtaaataaatttcttgccaatgagtattattgttgttagacaacgaatgcaataaaaagaaatactgaggtctgttgaagcaaaaaaaaaaaaaaaa

SEQ ID NO: 123 - DNA, 2495 bp, Human
  RIOK1
gggtggtggatctgtcggtcccgttttcccgtcgcacgtggtggccactgttggcttctgaatggtttgcaaggcggatatccacgccaaggcctttggatcggccgtgggtacatccgtctgagccgttcctttccatcgcagagcggcggcctccggcggcgctctccagtcatggactaccggcggcttctcatgagccgggtggtccccgggcaattcgacgacgcggactcctctgacagtgaaaacagagacttgaagacagtcaaagagaaggatgacattctgtttgaagaccttcaagacaatgtgaatgagaatggtgaaggtgaaatagaagatgaggaggaggagggttatgacgatgatgatgatgactgggactgggatgaaggagttggaaaactcgccaagggttatgtctggaatggaggaagcaacccacaggcaaatcgacagacctccgacagcagttcagccaaaatgtctactccagcagacaaggtcttacggaaatttgagaataaaattaatttagataagctaaatgttactgattccgtcataaataaagtcaccgaaaagtctagacaaaaggaagcagatatgtatcgcatcaaagataaggcagacagagcaactgtagaacaggtgttggatcccagaacaagaatgattttattcaagatgttgactagaggaatcataacagagataaatggctgcattagcacaggaaaagaagctaatgtataccatgctagcacagcaaatggagagagcagagcaatcaaaatttataaaacttctattttggtgttcaaagatcgggataaatatgtaagtggagaattcagatttcgtcatggctattgtaaaggaaaccctaggaaaatggtgaaaacttgggcagaaaaagaaatgaggaacttaatcaggctaaacacagcagagataccatgtccagaaccaataatgctaagaagtcatgttcttgtcatgagtttcatcggtaaagatgacatgcctgcaccactcttgaaaaatgtccagttatcagaatccaaggctcgggagttgtacctgcaggtcattcagtacatgagaagaatgtatcaggatgccagacttgtccatgcagatctcagtgaatttaacatgctgtaccacggtggaggcgtgtatatcattgacgtgtctcagtccgtggagcacgaccacccacatgccttggagttcttgagaaaggattgcgccaacgtcaatgatttctttatgaggcacagtgttgctgtcatgactgtgcgggagctctttgaatttgtcacagatccatccattacacatgagaacatggatgcttatctctcaaaggccatggaaatagcatctcaaaggaccaaggaagaacggtctagccaagatcatgtggatgaagaggtgtttaagcgagcatatattcctagaaccttgaatgaagtgaaaaattatgagagggatatggacataattatgaaattgaaggaagaggacatggccatgaatgcccaacaagataatattctataccagactgttacaggattgaagaaagatttgtcaggagttcagaaggtccctgcactcctagaaaatcaagtggaggaaaggacttgttctgattcagaagatattggaagctctgagtgctctgacacagactctgaagagcagggagaccatgcccgccccaagaaacacaccacggaccctgacattgataaaaaagaaagaaaaaagatggtcaaggaagcccagagagagaaaagaaaaaacaaaattcctaaacatgtgaaaaaaagaaaggagaagacagccaagacgaaaaaaggcaaatagaatgagaaccatattatgtacagtcattttcctcagttccttttctcgcctgaactcttaagctgcatctggaagatggcttattggttttaaccagattgtcatcgtggcactgtctgtgaagacggattcaaatgttttcatgtaactatgtaaaaagctctaagctctagagtctagatccagtcactgactctgtctggtgttgacagaggatttatttaagctattattttaataaagaactttgtacatttttatttttatatttttttctcttacaaatatgtttttggaagcatgataaatgtttaaatgtagtcaacatctgtaactcttacatgagtgtccagaggcactcatgggaaaattggttttgctttctttgtacacaccagagacccatctgaggtcatctgattataaggccatgtttatataaagggaatttcacccacagttcagctggctgttgattttcactgcaactctgcctttgtgtgtattggcgatcatttgtaatgctcttacacttcgtctttaatgttctttttggagttaggacctctcagttcataaagttttttacaattcaaaaaaaaaaaaaaaaaaaa

SEQ ID NO: 124 - DNA, 6650 bp, Human
  ROCK1
gctggttccccttccgagcgtccgcgccccgcatgcgcagtctgccccggcggtctccgtttgtttgaacaggaaggcggacatattagtccctctcagcccccctcgccccaccccccaggcattcgccgccgcgactcgccctttccccggctgggaccgcagcccctcccagaagctcccccatcagcagccgccgggacccaactatcgtcttcctcttcgcccgctctccagcctttcctctgctaagtctccatcgggcatcgacctcgccctgccccaccggacaccgtagcagcagccccagcagcgacgggacaaaatgggagagtgaggctgtcctgcgtggaccagctcgtggccgagactgatcggtgcgtcgggccgggccgagtagagccggggacgcggggctagaccgtctacagcgcctctgagcggagcgggcccggcccgtggcccgagcggcggccgcagctggcacagctcctcacccgccctttgctttcgcctttcctcttctccctcccttgttgcccggagggagtctccaccctgcttctctttctctacccgctcctgcccatctcgggacggggacccctccatggcgacggcggccggggcccgctagactgaagcacctcgccggagcgacgaggctggtggcgacggcgctgtcggctgtcgtgaggggctgccgggtgggatgcgactttgggcgtccgagcggctgtgggtcgctgttgcccccggcccggggtctggagagcggaggtcccctcagtgaggggaagacgggggaaccgggcgcacctggtgaccctgaggttccggctcctccgccccgcggctgcgaacccaccgcggaggaagttggttgaaattgctttccgctgctggtgctggtaagagggcattgtcacagcagcagcaacatgtcgactggggacagttttgagactcgatttgaaaaaatggacaacctgctgcgggatcccaaatcggaagtgaattcggattgtttgctggatggattggatgctttggtatatgatttggattttcctgccttaagaaaaaacaaaaatattgacaactttttaagcagatataaagacacaataaataaaatcagagatttacgaatgaaagctgaagattatgaagtagtgaaggtgattggtagaggtgcatttggagaagttcaattggtaaggcataaatccaccaggaaggtatatgctatgaagcttctcagcaaatttgaaatgataaagagatctgattctgcttttttctgggaagaaagggacatcatggcttttgccaacagtccttgggttgttcagcttttttatgcattccaagatgatcgttatctctacatggtgatggaatacatgcctggtggagatcttgtaaacttaatgagcaactatgatgtgcctgaaaaatgggcacgattctatactgcagaagtagttcttgcattggatgcaatccattccatgggttttattcacagagatgtgaagcctgataacatgctgctggataaatctggacatttgaagttagcagattttggtacttgtatgaagatgaataaggaaggcatggtacgatgtgatacagcggttggaacacctgattatatttcccctgaagtattaaaatcccaaggtggtgatggttattatggaagagaatgtgactggtggtcggttggggtatttttatacgaaatgcttgtaggtgatacacctttttatgcagattctttggttggaacttacagtaaaattatgaaccataaaaattcacttacctttcctgatgataatgacatatcaaaagaagcaaaaaaccttatttgtgccttccttactgacagggaagtgaggttagggcgaaatggtgtagaagaaatcaaacgacatctcttcttcaaaaatgaccagtgggcttgggaaacgctccgagacactgtagcaccagttgtacccgatttaagtagtgacattgatactagtaattttgatgacttggaagaagataaaggagaggaagaaacattccctattcctaaagctttcgttggcaatcaactaccttttgtaggatttacatattatagcaatcgtagatacttatcttcagcaaatcctaatgataacagaactagctccaatgcagataaaagcttgcaggaaagtttgcaaaaaacaatctataagctggaagaacagctgcataatgaaatgcagttaaaagatgaaatggagcagaagtgcagaacctcaaacataaaactagacaagataatgaaagaattggatgaagagggaaatcaaagaagaaatctagaatctacagtgtctcagattgagaaggagaaaatgttgctacagcatagaattaatgagtaccaaagaaaagctgaacaggaaaatgagaagagaagaaatgtagaaaatgaagtttctacattaaaggatcagttggaagacttaaagaaagtcagtcagaattcacagcttgctaatgagaagctgtcccagttacaaaagcagctagaagaagccaatgacttacttaggacagaatcggacacagctgtaagattgaggaagagtcacacagagatgagcaagtcaattagtcagttagagtccctgaacagagagttgcaagagagaaatcgaattttagagaattctaagtcacaaacagacaaagattattaccagctgcaagctatattagaagctgaacgaagagacagaggtcatgattctgagatgattggagaccttcaagctcgaattacatctttacaagaggaggtgaagcatctcaaacataatctcgaaaaagtggaaggagaaagaaaagaggctcaagacatgcttaatcactcagaaaaggaaaagaataatttagagatagatttaaactacaaacttaaatcattacaacaacggttagaacaagaggtaaatgaacacaaagtaaccaaagctcgtttaactgacaaacatcaatctattgaagaggcaaagtctgtggcaatgtgtgagatggaaaaaaagctgaaagaagaaagagaagctcgagagaaggctgaaaatcgggttgttcagattgagaaacagtgttccatgctagacgttgatctgaagcaatctcagcagaaactagaacatttgactggaaataaagaaaggatggaggatgaagttaagaatctaaccctgcaactggagcaggaatcaaataagcggctgttgttacaaaatgaattgaagactcaagcatttgaggcagacaatttaaaaggtttagaaaagcagatgaaacaggaaataaatactttattggaagcaaagagattattagaatttgagttagctcagcttacgaaacagtatagaggaaatgaaggacagatgcgggagctacaagatcagcttgaagctgagcaatatttctcgacactttataaaacccaggtaaaggaacttaaagaagaaattgaagaaaaaaacagagaaaatttaaagaaaatacaggaactacaaaatgaaaaagaaactcttgctactcagttggatctagcagaaacaaaagctgagtctgagcagttggcgcgaggccttctggaagaacagtattttgaattgacgcaagaaagcaagaaagctgcttcaagaaatagacaagagattacagataaagatcacactgttagtcggcttgaagaagcaaacagcatgctaaccaaagatattgaaatattaagaagagagaatgaagagctaacagagaaaatgaagaaggcagaggaagaatataaactggagaaggaggaggagatcagtaatcttaaggctgcctttgaaaagaatatcaacactgaacgaacccttaaaacacaggctgttaacaaattggcagaaataatgaatcgaaaagattttaaaattgatagaaagaaagctaatacacaagatttgagaaagaaagaaaaggaaaatcgaaagctgcaactggaactcaaccaagaaagagagaaattcaaccagatggtagtgaaacatcagaaggaactgaatgacatgcaagcgcaattggtagaagaatgtgcacataggaatgagcttcagatgcagttggccagcaaagagagtgatattgagcaattgcgtgctaaacttttggacctctcggattctacaagtgttgctagttttcctagtgctgatgaaactgatggtaacctcccagagtcaagaattgaaggttggctttcagtaccaaatagaggaaatatcaaacgatatggctggaagaaacagtatgttgtggtaagcagcaaaaaaattttgttctataatgacgaacaagataaggagcaatccaatccatctatggtattggacatagataaactgtttcacgttagacctgtaacccaaggagatgtgtatagagctgaaactgaagaaattcctaaaatattccagatactatatgcaaatgaaggtgaatgtagaaaagatgtagagatggaaccagtacaacaagctgaaaaaactaatttccaaaatcacaaaggccatgagtttattcctacactctaccactttcctgccaattgtgatgcctgtgccaaacctctctggcatgtttttaagccaccccctgccctagagtgtcgaagatgccatgttaagtgccacagagatcacttagataagaaagaggacttaatttgtccatgtaaagtaagttatgatgtaacatcagcaagagatatgctgctgttagcatgttctcaggatgaacaaaaaaaatgggtaactcatttagtaaagaaaatccctaagaatccaccatctggttttgttcgtgcttcccctcgaacgctttctacaagatccactgcaaatcagtctttccggaaagtggtcaaaaatacatctggaaaaactagttaaccatgtgactgagtgccctgtggaatcgtgtgggatgctacctgataaaccaggcttctttaaccatgcagagcagacaggctgtttctttgacacaaatatcacaggcttcagggttaagattgctgtttttctgtccttgctttggcacaacacactgagggttttttttattgcgggtttgcctacaggtagattagattaattattactatgtaatgcaagtacagttgggggaaagcttaggtagatatattttttttaaaaggtgctgcctttttggatttataagaaaatgcctgtcagtcgtgatagaacagagttttcctcatatgagtaagaggaagggactttcactttcaagtggaacagccatcactatcaagatcagctcatggaaggagtaaagaaaatatctcaaaatgagacaaactgaagttttgttttttttttaatgacttaagtttttgtgctcttgcaagactatacaaaactattttaagaaagcagtgatatcacttgaacttcagtgccctcactgtagaatttaaaagccttactgttgattgcccatgttggacttgatggagaaattaaatatctttcattatgctttacaaaatactgtatatgtttcagcaagtttggggaatgggagaggacaaaaaaaagttacatttaatctatgcatttttgccaagccatattgagttattttactactagagacattaggaaactaactgtacaaaagaaccaagtttaaaagcattttgtggggtacatcatttctataattgtataatgtatttctttgtggttttaaatgataaagacattaagttaacaaacatataagaaatgtatgcactgtttgaaatgtaaattattcttagaacactttcaatgggggttgcattgtccttttagtgccttaatttgagataattattttactgccatgagtaagtatagaaatttcaaaaaatgtattttcaaaaaattatgtgtgtcagtgagtttttcattgataattggtttaatttaaaatatttagaggtttgttggactttcataaattgagtacaatctttgcatcaaactacctgctacaataatgactttataaaactgcaaaaaatgtagaaggttgcaccaacataaaaaggaaatatggcaatacatccatgatgttttccagttaacataggaattaccagataaatactgttaaactcttgtccagtaacaagagttgattcatatggacagtatgatttattgtttatttttttaaccaaatacctcctcagtaatttataatggctttgcagtaatgtgtatcagataagaagcactggaaaaccgatcgtctctaggatgatatgcatgtttcaagtggtattgaaagccgcactgatggatatgtaataataaacatatctgttattaatatactaatgactctgtgctcatttaatgagaaataaaagtaatttatggatgggtatctttaatttttactgcaatgtgttttctcatggctgaaatgaatggaaaacatacttcaaattagtctctgattgtatataaatgtttgtgaaattccatggttagattaaagtgtatttttaaaagataaaa

SEQ ID NO: 125 - DNA, 5983 bp, Human
  SMC2
cacaggaaataagcaatggaggtggggtcctttgctcgcgccgaaattcaaaggaataaatagttccggcgcgggtgttgagagcggtgtggcaggtgttgtagccgctatggtgaagttcgctttgtagcggccccggctagagagttgttctgttccctgcctttgtgacccggaggagcttttggggtgcgtcaagcccctggcctgaggcagcgaactggtttgtggcctgtttgattcctgtcagaggtttgctgacccaagacagtatcgaaaatgcatattaagtcaattattctagagggattcaagtcctatgctcagaggaccgaagtcaatggttttgaccccctcttcaatgctatcactggcttaaatggtagtgggaaatccaacatattggactccatctgctttttgctgggcatctccaacctgtctcaggttcgggcttctaatttacaagatttagtttacaaaaatgggcaggctggtattaccaaagcctctgtgtcaatcacttttgataattctgacaaaaagcaaagtcctttaggatttgaggttcatgatgaaatcacagtaacaaggcaggtggttattggtggtagaaataaatatttaatcaatggagtcaatgccaacaacaccagagtacaggatctcttctgttctgttggccttaatgttaacaaccctcactttctcatcatgcagggccgaattacaaaagtattgaatatgaaacctccagagattttatccatgatagaagaagcagctggaaccaggatgtatgaatacaaaaaaatagctgcacagaaaactatagaaaaaaaggaggctaagctgaaagaaattaagacgatacttgaagaagagattactccaaccattcaaaaattaaaagaggaaagatcgtcctacttggagtaccaaaaagtaatgagagaaatagaacatttgagtcgtttatatattgcttatcagtttttgctggctgaagataccaaagtacgctcagctgaggaattaaaagaaatgcaagataaagttataaagcttcaggaagaattgtctgagaatgataaaaaaataaaagcacttaatcatgaaatagaagaattggaaaaaagaaaagataaggaaactggaggtatacttcgatctttagaagatgctcttgcagaggctcagcgagttaatactaaatctcaaagcgcatttgatctcaagaagaaaaatctggcatgtgaggaaagcaaacgcaaagagctggaaaaaaatatggttgaggactcaaaaactttagcagcaaaggaaaaagaggttaaaaagataacagatggactgcatgcccttcaagaagcaagtaataaagatgctgaagctctggcagctgcacagcagcacttcaatgctgtttccgctggcctgtccagtaatgaagatggagcagaagcaactcttgctggtcaaatgatggcctgtaaaaatgatataagtaaagctcagacagaagccaaacaggctcagatgaagttgaagcatgctcaacaggaattaaagaataaacaagctgaagttaagaagatggatagtggctacaggaaggatcaagaagctctagaagctgtaaaaagacttaaagaaaaacttgaagctgaaatgaaaaagctaaattatgaagaaaataaagaggaaagccttttggaaaagcgcaggcagctgtctcgtgatattggtagattgaaagaaacatatgaagctctattagccagatttcccaatcttcgatttgcatacaaggatccagagaagaactggaatagaaattgtgtgaaaggacttgtggcttctctgattagtgtgaaagacacttctgcaaccacagctttagaattagtggctggagaacgactctacaatgttgtagtagacacagaagttactggtaaaaagctactagaaaggggggaactgaaacgtcgatacactataattccactcaataaaatttcagccagatgtattgcaccagaaactctgagagttgctcagaatcttgttggccctgacaacgttcatgtggctctttccttggttgaatataaaccagaacttcagaaagcaatggagtttgtctttggaacaacatttgtttgtgacaatatggataatgccaaaaaagtggcctttgataagaggataatgactagaactgtaactctcggaggtgatgtgtttgatcctcatgggacattgagtggaggtgctcgatcccaggcagcttccattttaaccaagtttcaagaactcaaagatgttcaggatgaactgagaatcaaagagaatgagctgcgggctctagaagaggaattagcaggtcttaaaaacactgctgaaaagtatcgccaactaaaacagcagtgggagatgaaaactgaagaggcagatttattacaaaccaagctccagcaaagctcatatcacaagcaacaagaagaattagatgcccttaaaaaaaccattgaggaaagtgaggagactttgaaaaacactaaagaaatccaaagaaaagcagaagaaaaatatgaagtattggaaaataaaatgaaaaatgcagaagctgaaagagagcgagaactgaaagatgctcagaaaaaactggattgtgccaaaacaaaggcagatgcatctagcaagaagatgaaagaaaaacaacaggaagttgaagctatcactctggaactggaagagctcaagagagagcatacatcttacaaacaacagcttgaagctgtaaatgaagctatcaaatcctatgaaagtcagattgaagtaatggcagctgaggtggctaaaaataaggagtcagtaaataaagctcaagaagaggtgaccaagcaaaaagaggtgataacagcccaagacactgtaattaaagctaaatatgcagaagtggcaaaacacaaggagcaaaacaatgattctcagcttaaaattaaggaattagaccacaacatcagcaaacataaacgggaggctgaagatggtgctgcaaaggtatccaaaatgttgaaagattatgactggattaatgcagagagacacctctttggccaacccaatagtgcctatgatttcaaaactaacaaccctaaagaagctggtcagagacttcagaagttgcaagaaatgaaggagaaactaggaagaaatgtcaatatgagagctatgaatgtattgacagaagctgaagagcgatacaatgacttgatgaagaagaagagaattgtagaaaatgacaaatccaaaattcttacaactatagaagaccttgaccagaagaaaaaccaagccctaaatattgcatggcaaaaggtgaacaaggactttgggtctattttttctactcttttgcctggtgctaatgctatgcttgcaccaccagagggtcaaactgttttggatggtctggagttcaaggttgccttgggaaatacctggaaagaaaacctaactgaacttagtggtggtcagaggtctttagtggccttgtcattaatactgtccatgcttctcttcaaacctgctccaatttatatccttgatgaggtagatgcagccttggatctttctcatacccaaaacattggacagatgctgcgtactcatttcacacattctcagttcattgtggtgtcactaaaagaaggtatgttcaacaatgcaaacgttcttttcaaaaccaagtttgtggatggtgtttctacagtagccagatttactcaatgtcaaaatggaaagatttcaaaggaagcaaaatccaaggcaaaaccacccaaaggagcacatgtggaagtttaaactacaaagttatttcttcatcttgacctgtttttttaaatgtaaacttttaaggacttgagataactaatttgtttatatacaaaaattaatgttactgtgttacttaacccatgttttctctttatataatcacttatcgcttacaaatgagcatatattcctcatctcttaactagtctaattatggtccaattattgtggttgtgattttatgcatatcatcaaatgtttttttcttatgcgggtcttttatatattagggatcctgagatacccgattctatatgtaaaagctaatatacaaaaaagcagattaaattacatgataaatgtagctgatcatcagtgtttaattgatttaattcctaaggcaatattaatgtgttttctaaagtcattcaggtaaggaagaattataaatcaggtaactggaccaacaaagggaacacatataaagctattatgcatgcatggagccgtttgaggctagttttttaaggccacaactccagacccctgatttagactgagataggaaacagatcttgaaagaatccttattttaatgatacatgaatatcatgttcctatacgcttaataattggtctctacgttttaatgatacatgaatatcatgttcctatacgcttaataattggtctctacgactttaatgtttttgtttttttaagctgtgtaagtatttttaaatcaaagcttaggaggtgtgttgcgtggtactatctgctgcaaatttatctgaagtttgttaatattttccaagatttttgtcagccttttcataatccagtcattaacaacctattggtaaacaagaatgtaggtgccagtagactaaaccaaatttatttttccctgagtctgatatatatatgtataaatataaataactcaatccatctgttccaccaaaataactcaaaagttggatgattatttgtcttccgctttccagttcaaagggatgaaattcctttagaacttgaaagatgacactagcgaacaccatgagaatactgtctacagtttttggtacgtcatcactagaacagtgaccccaaactgaatcatgaaaggtctgacatgatgtaatctgatcttccatgtgttattttggccccacatctcttcttgattttttagtcttatttccttagtgttattatcatacttcccctgatatatggccgtacttcctggccctgggcttgacatttcccacccttcattctccatacatatgagatgtcagaaaacatgcagtaattgatattatgggacacattggaaaggattgaatctggaattagttctgtccactgtggaggggagaggaaataatgctgtaaatgttgagttacagaaagtccaatgtcaaatatagtttttttgtttcctttcaaatgtattacagactgtgccaaaacagttaccaattcacactgtcaatattaaagtataccatagtatacaaattagtcagtacttgctgttaattttaatatttctgatttaacagttagttattaagtggtacttcattgctgttttagccaacgttttaaaaataatttgggagtttgactattttggcttacgtactcatttccttttctctgctaaaaatgttttgcttgtgtgcgttcctgatttttgtcttgtataatcttgatctttgaaaaccctcaaacatgtattaaattgttgtaactttttttcattagagggaagacattaaggggattggggacatttgtttcacacatctgcagtaatatgagttaactaatatttaacaagctctttctttacattagctgctgttctcatttgtatgtattgtcatatttaatcctcagagtaacctagtgaggtaaatactgttgttgtcagcatggtgtaatcgaggaattgagtgagttgagcagaaaagttaggaaacttgctcagggtgataatacagttaggagtgtcagggcccatggacaaatcttgtcagtctccagaacctaagatatactacgtcactgacagcttgaacatttgtatttattgtacagaataaatttaagaaaaataaaaaaa

SEQ ID NO: 126 - DNA, 6895 bp, Human
  TMF1
gtagatttggttgctgtgtacgtggaagaagcaagcgcatgcgcacatgggcccccttcgtctcagctgtgcgggaacggccgagggtaacatcccgggctcgcgggaggctgtcggggtaatggccacacgctgacagaaccagccgagtggaaaaggggagcgaagccgttcctctgcacccttccccaggcctgaggccttcccgcttggtgctgccgccgccactgccggctgaggaggggcgatgagttggttcaacgcctcccagctctccagcttcgctaagcaggccctgtcccaggcccagaagtctattgacagggttctggacatccaggaagaggagccgagcatctgggccgagaccattccgtatggagagccgggaataagttcccctgtcagtggaggatgggatacttcaacctgggggttgaaatcaaacactgaacctcagagtccaccaatagcctctcctaaagcaatcacaaagccagttcggaggactgtggtcgatgaatctgaaaatttcttcagtgcctttctctcgccaactgatgtccagaccattcagaagagtccagtggtatcaaaacctccagcaaaatcacaacgaccagaagaagaagtgaaaagcagcttacatgaatccttgcacattggccagtcaagaactcctgaaacaactgaatcacaagtaaaagactcttctttgtgtgtttcaggggaaactctggcagcaggtacttcatcacctaaaactgaaggcaagcacgaagaaactgttaataaagaatcggatatgaaggtgccaactgtaagtttgaaagtatctgaaagtgtaattgatgtgaaaacaactatggaaagtatatctaatacgtctacgcagtctctcacagcagaaacaaaggacatagctttggaacctaaggaacaaaaacatgaagacaggcagagcaatacaccttctcctcctgttagtaccttttcatcaggtacttctaccaccagtgatattgaagttttagatcatgaaagtgtaataagtgagagctcagcgagctcgagacaagagactacagattcaaaatcaagtcttcacttgatgcagacatcttttcagcttctctctgcatctgcttgtcctgaatataatcgtttagatgatttccaaaaactcactgagagttgctgttcatctgatgcttttgaaagaatagactcatttagtgtacagtcattagatagccggagtgtaagtgaaatcaattcagatgatgaattgtcaggcaagggatatgctttagtgcctattatagttaattcttcaactccaaagtctaaaacagttgaatctgctgaaggaaaatctgaagaagtaaatgaaacattagttatacccactgaggaagcagaaatggaagaaagtggacgaagtgcaactcctgttaactgtgaacagcctgatatcttggtttcttccacaccaataaatgaaggacagactgtgttagacaaggtggctgagcagtgtgaacctgctgaaagtcagccagaagcactttctgagaaggaagatgtttgcaagacagttgaatttctgaatgaaaagctggaaaaaagggaggctcagttattatctcttagtaaggaaaaagcacttctagaagaagcttttgataacctgaaagatgaaatgttcagagtgaaagaagaaagcagtagcatttcttccttgaaagatgagtttactcaaagaattgcagaagcagaaaagaaagttcaactagcctgcaaagagagagatgctgctaaaaaggaaatcaaaaacataaaagaagaacttgccactagattaaatagtagtgaaactgcagaccttttgaaagagaaagatgagcagatccgagggttaatggaagaaggagaaaaactttcaaaacagcagctgcacaattctaacatcatcaagaaattaagagctaaagacaaggagaatgaaaatatggttgcaaagctgaacaaaaaagttaaagagctagaagaggagttgcagcatttgaaacaggtccttgatggcaaagaagaggttgagaaacaacatagagaaaatattaaaaaactaaattccatggtagaacgccaagagaaagatcttggccgtcttcaggtagacatggatgaacttgaagaaaagaaccgaagtattcaggctgccctggatagtgcatacaaagaacttactgatcttcacaaagccaatgctgcaaaggatagtgaggcacaggaagctgctctgagccgtgaaatgaaagctaaagaagaactttctgcagcattagagaaggcccaagaagaagcccgtcagcagcaagaaacattagccattcaagtgggggaccttaggcttgcattgcagcgtacagaacaagcggctgccagaaaggaggattatttacgccatgagatcggtgaacttcagcagagactccaggaagcagagaatcgaaaccaggaactgagtcaaagtgtttcatcaacaacaagaccattgcttcgacaaatagaaaatttgcaagcaaccctgggatcccagacatcgtcgtgggagaaattagagaagaatctttctgataggcttggtgaatcccagaccttgctggcagcagcagttgagagagaacgtgcagctacagaagaactccttgctaacaaaattcagatgtcttccatggagtcacagaattctcttttaagacaggaaaacagtagatttcaagcccagctagaatcagagaaaaataggctgtgtaaactggaggatgagaacaataggtaccaggttgaattggaaaacctaaaagatgaatatgtaagaacacttgaagagacgaggaaagaaaagacattgttgaatagtcagttagaaatggaaagaatgaaagttgaacaagaaaggaagaaagccatttttactcaagaaacaataaaagaaaaggaacgcaagccattttctgtttctagcactcccaccatgtcacgctcaagttcaataagtggtgttgatatggcaggactacagacatcttttctgtctcaggatgagtctcatgatcactcatttggaccaatgcctatatcagcaaatggaagcaatctttatgatgctgtaaggatgggagcaggatcaagcataattgaaaacctacagtctcagctaaagctaagggaaggggaaatcactcatttacagctagaaattggcaatctagaaaaaactcgatcaataatggctgaagaactagttaaattaacaaatcaaaatgatgaacttgaagagaaggtgaaggagatacccaaacttagaactcagctaagagatttggatcaaaggtacaacactattctgcagatgtatggagaaaaagcagaagaggcagaagaacttcgattagatctcgaagatgtaaaaaatatgtacaaaactcaaatagatgaacttttaagacaaagtctcagttaacttgtgaaaattgaattcccatcaaactgaatgtaagcatttaatatctaaacatttaatgtggacttccaataaattcttttatagaattagaaagtgggatttactgtagagtgtaaaaatttttttaaaattgttttacactatgtagtaatatttacagttaaattattttgtgcaatatttgaactttatttttgaaactattctttaaagatttattttttaaagcattcattttttttccttgaatagcacagagatttattactttatcctcatataaatatggctagagaagaagaatggtgttcatatatgtattgtagatatacaactagttgtatctataatttgtaagtgtttatatatatattaagaacatttgaagagtaatgttaacatactgaaactttgaaatctttcacatttaaaatttcaacatatcttaattactgctcatgaaaatgtacattaagtgttaaagtaaaaaattattaaatctgtggctattaaattttaaactaatttttttcctttaaaagtaagagtcacactgacactgtctgaaatttaaagagtgaatgatttaaacttaaaaaaaattttgatctgaaaatttatttcacccagctttcacaattaagtctgtataaaatgtggtaccttttggtacctatccagagaaacctgtacatattcaatgttatctagatgtgattggataatggagaaaatttatttataatgattttgcaatggcatcaataacatttaaatgattttgaagaagtattattttactaccctataaaatgaatcgaaaataataaagttcttaacataatttactctttaaaaattacctgttcatattttgtaaacccatatttttagcacattaaaaatgaatgtttgatattacagaatattcataacaaaatggaagaattataggaattaacttgaatttggcatttttaattttgtgatttatcattttattttttcttgaaatttcaaacacaaggaaagcatagaatagcttttaaaagtagctatgccttcttccaaatgttattttattcaaaaaggtaaccaggttgtgttttaaacctgtgaaatattgtgatgcattttattactgaaagttatttaactgcctttacttgcacataaaaactctcatttacggccaggtgctgtggctcatgcctgtaatcccagcactttgggaggccaaggcgggcatatcacctgatgtcaggagttcaagaccagcatggccagcagtttggtgaaaccccatctctactaaaaatacaaaaattagcctggcgtggtggtgtgcgcctgtaatcctagctactcgggaggctgaggcaggagcattgcttgaacctgggaggtggaggttacaatgagccaagattgtgccactgcactccagcatgggtgacagagaaagactccgtctcaaaaaaaaaaaaacaaactcttatttaatttttagttaaaattaaaacactagtacttcagaatatagatacaagtacaccatcttgaagaatttggagtttttcagggcaattcaaatgacctcattttttgttctttttgtattccagacagtgtttctgtcattggatctctgattggtagtgttaataaatattctttcagtgtgagccagattcataaaattaattttcttcattttagtagtaaaaagtagtctaatagctttttgtcagcttgatttttttgtgtgtgtaatattcaagggcagaatgacaggacagataagcaataagaaatgtatagaattagaaaatatagtagttccctcttacccatgggacatacgttccaagacccccagtgaacgtctgaaaccatggatagtatagacacctctatacactgttttttcctatacatatatacctatgataaagttctatttataaatcagggacagcaagagataaacaataactgcaaatagaacaattataacagtgcactgtaataaaagtgatgtaaatgtgatatgtctgtctctttctctcaaaatatcttattgtactgtactcacctgtaatcagactgtggttgaccgtgagtaaccgaaaccacagaaagcaaaatcgtggataaggggagactactctatatgaaacttaagttacaaaattctctgaagcatttgaaactagacgttttggaattataaaatagtccctttaaaatatccactagtagaaaaaaacttcatttgcagagaaaagattgcaataaaactcattcctaaacttttcaattttataaaattaaacattctttttttatccgtattaacaatttctagttacatagtttctagttacatattaccatatattactctttatctacaaataaatagctgatactcaaactgatcatattttgattgttaaacacttggatctctcaatacttctgtaagttaaagtgaacttaaacagtttcttgaaaaactccagtaggtggcagaatacctattgaatattcgttgctatactttgctgtttgtcattaaaacatctctacccatattcttgcaaaataatatttatattttaatggataggaaaatgatttgcaattagatgtttccattcttgaaagaaaaaagctgcaaataacattttcaagaatataaaaaaatgagtaaacaaagggaaggttgtttggtcatttatagacaattaagcacagactgtagatgtccttccaattcttgggaggctaaactgagtctaccatttcttacatttcttttacctattttttgagaattgccagttgtacagtgtttagcatgtggaatgtaccaaatatatctatgttgtgacttaagatattctaaatgtggataacttctgacctaggaaacatgaagtttgtagtgaagtaagtgaaaagaatgttcaggaaattttttttctccatctcttcagttggcatttattgagagttttatttgaatgcttattaaaagtatatgatttataatatttagaaaatagaagaaaaaagaaaactgtagatgttttatcttgttttaatactgtatgtttagtacgtatacatttatgttctagtgtatcaaaatttttcattttcattaaagtgaatccaattttccatattctaggtccattttaaaccatgaaaactttaatcacatattttgtaaagggctgaaagtatgatttaaactacagattgatatattttaattctaaatgaaaggtaatgtaaataagcatggatctgattgaataaagattttaaaatagtaaaaaaaaaaaaaaaaaa

SEQ ID NO: 127 - DNA, 3892 bp, Human
  TWISTNB
gtgggaaccttgacaagcagcatggctgcaggttgctcagaggcgccgcggccagcggcggcttctgatgggtctctggtagggcaggctggcgtcctgccttgcctagagttgccgacttatgccgctgcttgtgcgctggtgaacagtcgctactcatgcctggtggccgggccgcaccaaaggcacatcgcgctgtcgccccgctaccttaacaggaaacgcaccggcattcgagaacagcttgatgcggagctccttcgctattctgagagccttttaggtgtccctattgcatatgataacatcaaagttgtgggagagcttggagatatttatgatgatcaaggacacattcatcttaacattgaagccgattttgttattttctgccctgaaccagggcagaagcttatgggtatagttaataaagtgtcttctagccacattggctgtttagtacatgggtgtttcaatgcctccattcctaaacctgagcagttgtcagctgagcagtggcaaaccatggagataaacatgggtgatgaactagaatttgaagtatttcgtttagactcagatgctgctggagtattctgcattcggggaaaactaaatatcacaagtttacaattcaagcgctctgaagtttctgaagaagttacagaaaatggcactgaggaagctgctaaaaaacctaaaaagaagaaaaagaagaaagacccagagacatatgaagtggacagtggtaccacaaagctagcagatgatgcagatgacactccaatggaagagtcagccctgcagaatactaataatgcgaatggcatctgggaggaggagccaaagaaaaagaagaagaagaaaaagcaccaggaagttcaggaccaggaccctgttttccaaggcagtgactccagtggttaccaaagtgaccataaaaagaaaaaaaagaaaagaaaacacagtgaagaggccgaatttaccccacctttgaaatgctcaccaaaaagaaaagggaaaagtaattttctttagtgtattttaaacacgattcagtttttaaaagatcgatctacatacaatagatgaataaatgttttcagtgatatgaaaaggttaagtatgccagtagtttacaaaacagaaaatacttaactaggagtaggaggctttatatgctaaaaatgataaaactgactgtaaattaatttggggaaagccagtattgttaaaataccattttatacaaaataaaaagctgctctcactgtcagctctcatattcttccaggttttgcactctacataaaattatttctacaatgtcaagactagccaaaggactttataatacaatattatattactaaagaatgagttaagtttgagattttgatgatttgattttgtgtgtgtttaataggcttcaccttattacatgctattttattttgcttttttaaaaactcaggacattaactaattttaggttttcctttatcatggctttctacagtatttctattgtttaacataaaatagtttgccaaagaagtttctgaagtcttcacagctcttaaaagccaggccagtactgactgtgtggtggtaaatgctattcattattttcttttctttcttccaagtgcatgtgtgtccttgtcttcttaagtctgagaggttgctggaaaggactgttttcttgtacttgttcatttgtgcctcagccattctagttttgttgtgtgttggaggacagtctaatgaagacaggataaatgtgattctgactagtgggaaatttcagattactttttaatgattggaatgggctataagatattgtgctgaagagaaaacagttgttctgttcactgctttcattgagaaaatgtggaatgtctcttgactaattgacaaagtgtaatgaaatgacaagctggttgaagctggtaatcaatgcatggccatatttattcattttccacacacttgaccatctactttgtataacacattctgctaaggcccagggatacaatggcaaacaagatagatgtagttccttcccttgtggcatgtcataagagaaacagatgtgcatatacacacaataaataagaaaattaataattgtattaagtggtatgaaaaaaagggggaggattgttcactcactgttacctgtgttagtatctgcaaatgcatgaatggttgaactcccatgtcagcatttttgttgccatttatttagtaccagacatagtgctggtctcacagcttaatatttggtaatgaataaattctgctagtggtatatgttgatctgaacttacaatgatgggatatagaattggcagagtggcagatgttcacaattgtctacaagtagatgtgctagacaatggaaggatgcaggccaacctctttgattacaattgagattcatgtgactattgagccctggaaatgtagcttgtccaaattgagatgtgctgtcagtataaaatacataccagattttaaagatgtaccaaaaaatgtaaactatctcaatttttatattggtgaaatcaatatgtcttggtatagtggcttaaataaaacaattttagcctttctcagtttatttttctgcaaaaagattaaaaattgtacatgaagctcatgttaactttcttttggtcagtgctattttaaaggaagtatgagttgaaaaaaaattgaaataaactatatcatattactaggacttaatatagtggcatacccaggaaatgcttagtaagtgttcccttcacattttaaaatttgagtatacaatcatgtttgacaatatagaaatttaatttttagtgaaacaattctaaaccccttttccatagacacaagaaagatggcaaatttatgctattcctggaaaaatacattgtggcttagcaaataagcaagttcccacgttacttttgttttgcttcaagtaatacttctgccagttgtgttttatgaattaaacagggaacggcatgctgaacttgaaactagatttgttcctgcttttttcacaatgtgagtagttttgaaaagtcagatctggccatttgtctttcctagaatagcataactttgttcattgttttttttgtttgtctttctgacacagaaagactgatgatggtgtccactatgtattcttcaaaacatttggcacatgctgcactaacctagtctatcttttctatcttggaatttgctcatacaaaccctatagcctagactagatcccttaccctctctccagttcctatcattcacccatttcactgtgcaagacacctcactagtcaccagtgatacagaaatgacttttaagcagtttctgctcttaagggcttaccgttttgtctataagatacacaagtataaatgacaagtacaaataacaatgaatgtttaatgctttacgtttagtgtttaagcttgttgttggaagagcagcattttgacccttggagaagaaaaactagctgtggcattccaggtggagaacctgacagaggactaagaagttatctaatgtaaaagacctcaggcaccaccttcgcataaactttttccagacaaggctaaatgtgcatgcttcataaccataattcttatttttctttaataaatatttttctacttgtaacactgtgcattatttcaaactgtttacctgtttgtaaagcttgtctcttaatcaaatttgtcttgaccaaataagtttcctgagggctggaattatgccttaactatatctatagtatttaacagtgaatcctttgtataatgaaagcatcaacagataattttaaattgataaataaaaagcacagtttcaaatggt

SEQ ID NO: 128 - DNA, 6527 bp, Human
  ZNF638
ggcgcgcatgcgtgcagctctttggaggcggtagctttttcggcgtcgagactggaggctgagtgctaaactgtgtggggcgcggatgggatccagctgttagtcgggtaggcatagctttgtgttattcttggaaaatttcgcaccacttgtgaattccttgaacctgggcattgcaaacccacttctgttgggcccatctcctttgcactttgctcagattaagactcagttggcgcttcagcagctgaatgccgttgcctcacatggttcaacaccaccttatactttattaaatcaggctttcttgaaaatagccatgtcgagacccaggtttaatcctcgaggagactttccacttcaaaggccacgagcacctaacccttctgggatgaggcctccaggaccatttatgaggcctggatctatgggtctcccaagattttacccagcagggagagcacgtggaattccacacagatttgctggccatgaatcttatcagaacatggggccacagagaatgaatgttcaggtaactcaacacagaactgatccaagattgaccaaagaaaaactggattttcatgaagcacaacagaagaaggggaagcctcatggtagccggtgggatgatgagcctcatatatctgcatcagtggcagtgaaacagagttctgtaacacaggttacagagcagagtcccaaagtacagagccgctatacaaaagagagtgcctcaagtatcttagcaagttttggattatctaatgaagacctagaagaacttagtcgctatcctgatgaacaactaactcctgaaaatatgccattaattttgagggatataagaatgcgaaaaatggggcgccgattacctaatttaccttctcagagcagaaataaagaaacacttggtagtgaagcagtttcaagtaatgtgatcgattatgggcatgcaagcaaatatggctacacagaagatccacttgaagtacgtatttatgatcctgaaattccaactgatgaggtcgagaatgaatttcagtcacagcagaacatttctgcatctgttcccaatccaaatgtgatatgtaattctatgtttcctgttgaagacgtatttcgccaaatggacttccccggtgagtcctccaataatcggtcctttttctcagttgagagtggaaccaagatgtcaggcttacacatttcaggaggacagtcagtccttgaacccataaaatccgtcaaccaatccattaaccaaacagttagccagacaatgagtcaatctctgattcctccatctatgaaccagcaacctttttcgtcggaattaatttcatctgtaagccagcaagagcggatcccacatgaacctgtgattaattcatctaacgtacatgttggatcaagaggaagtaaaaagaattaccagtcacaggctgacattcccattcggtctccctttggtattgtgaaagcatcctggctaccaaagttttcacatgctgatgcccagaagatgaagagacttccaactccttctatgatgaatgattattatgcagcatctccaagaatatttccacatttgtgttctctgtgtaacgtagaatgtagtcatttgaaggattggattcagcatcaaaatacatctactcatattgagagctgtcgacagttacgtcaacagtatcctgattggaatcctgagatcctcccatcgagaagaaatgagggcaatagaaaagaaaatgaaactccacgaagacgttctcattcccccagtcctaggcgttctagaagatcaagctcaagtcacagattccgtcggtctcgaagcccaatgcattacatgtataggccgagaagtcgaagtccaagaatttgccatcgtttcatttctagatacagatccagatccagatcccgttcaccatatcgaattagaaatccatttagaggtagtccaaaatgctttcgatcagttagccctgagaggatgtcaaggagatcagtgagatcatcagatagaaaaaaagcattagaagatgtagtacaacgatctgggcatgggacagaatttaataaacagaagcatcttgaagctgctgataagggacattcaccagcacaaaagcctaaaactagcagtggaacaaaaccatcagttaaacctacaagcgctacaaagagtgattcaaatctaggaggacattctattcgttgtaaatcaaagaatcttgaagatgacactttgtcagaatgtaaacaggtgtctgataaagctgtttctctccagcgaaagcttcggaaagaacagtcattgcattatggttcggttcttcttataactgaattaccagaggatggttgtactgaagaagatgtgagaaaattatttcaaccatttgggaaagtgaatgatgtcctaattgttccatatagaaaagaggcttacctagaaatggaatttaaagaggcaattactgcaattatgaagtacattgaaacaacacctcttacgataaaaggaaaaagtgtgaaaatatgtgttccaggaaagaaaaaagcacagaacaaagaggtgaagaaaaagactttagagtcaaagaaagtatctgcatctaccttaaaaagagatgcagatgcttcaaaagctgttgaaattgttacttcaacttctgctgccaaaactggacaagccaaggcatctgtagccaaagtaaacaaatctacagggaaatcagcaagttctgtaaaatctgtggtaacggtagctgttaaaggtaataaagcttcaatcaaaacagcaaaatctggtggaaagaagtctctagaagccaaaaagactgggaatgtcaaaaacaaagactctaacaaacctgtgactataccagaaaactctgaaataaagaccagtattgaagtcaaagccactgaaaactgtgctaaagaagctatttctgatgctgctttggaggccacagagaatgaaccacttaacaaggaaacagaagaaatgtgtgtgatgcttgtctctaatttgcctaataaaggatattctgtagaagaagtttatgacttagcaaaaccatttggtggtttaaaggatatcttgattttatcatctcataaaaaggcatatatagaaataaatagaaaagctgctgagtctatggtaaaattttatacctgcttcccagtattgatggatggaaatcaactctcaataagtatggctcctgaaaacatgaatataaaagatgaggaagctatatttataaccttggtaaaagaaaatgacccagaggcaaacatagatacaatttatgatcgatttgtacatcttgataatttaccggaagatggacttcagtgtgtactttgtgttggacttcagtttggaaaagtggatcaccatgtattcataagtaatagaaacaaggcaattcttcagttagatagtcctgaatctgctcagtcaatgtatagctttctgaaacaaaatccacaaaatattggtgaccatatgttgacctgctcattatctccaaagatagacttaccagaggtgcaaattgagcatgacccagaattagaaaaagaaagccctggcttgaaaaacagtccaattgatgaaagtgaggtgcaaacagcaactgatagtccctctgttaaacctaatgagcttgaagaagaaagtactcccagcattcaaacagaaactttggtacagcaggaagagccttgtgaggaagaagctgaaaaagcaacatgtgattctgactttgctgttgaaactttggagcttgaaactcaaggagaggaggtcaaagaagaaattcctcttgtagcatccgcttcagtcagtattgaacaattcactgaaaatgccgaggagtgtgctttaaatcagcagatgtttaacagtgacttggagaagaaaggggcagaaattattaaccctaaaacagcattgttaccatctgacagtgtgtttgcagaagaaaggaacctcaaaggaattctagaagaatctccatctgaagcagaagatttcatttctggaattacacagactatggtagaagctgtagctgaagtagaaaaaaatgaaactgtttcggaaatattgccatcaacttgtattgtgacgttagtaccaggaattcccactggggatgagaagacagtggacaaaaagaatatttctgaaaaaaaaggtaacatggatgaaaaggaggagaaggaatttaatactaaggaaaccagaatggatcttcaaataggaacagagaaggctgaaaagaatgaaggtaggatggatgcagaaaaggtggaaaagatggcagcaatgaaagaaaagcctgcagaaaacactttattcaaggcatacccaaataaaggagtgggtcaggctaataagcctgatgaaactagtaaaactagtattctggctgtatcagatgtatctagcagtaaaccaagcatcaaggctgttatagtctcttctcctaaggcaaaagctacagtttcaaaaactgaaaatcagaaaagttttccaaaatctgtgcccagagatcaaataaatgctgaaaagaaactttcagccaaggaatttggtctgcttaaacccacaagtgccaggtcaggcttggcagaaagcagcagtaaattcaaacctactcagagcagtcttaccagaggaggcagtggaaggatctcagccctgcaaggcaagctttctaaactggattacagagatataacaaaacaatctcaggaaacagaggctagaccttccatcatgaaacgggatgacagcaacaataagactttggctgagcaaaacactaagaatcctaaaagcactactggtagaagttccaaatctaaagaggagccattatttccatttaatttggatgaatttgttactgtggatgaggttatagaagaagtgaatccttctcaggccaagcagaatccactaaagggaaaaaggaaagaaactctcaaaaatgttcctttctctgaacttaacttaaagaagaaaaaggggaaaacttccactcctcgtggtgttgagggagaactatcttttgtgacattggatgagattggggaagaggaagatgcagctgcacatctagcacaagctctagtcactgtggatgaagtaattgatgaagaagaactaaatatggaagaaatggtaaaaaattcaaattcactttttacattagatgaattaattgaccaagatgattgcatttcccacagtgaacctaaagatgttactgttctgtcagtggctgaagaacaagatctcctcaaacaggaacgcttggtaactgtggatgaaattggagaagtggaagagctacctttgaatgagtcagcagacataacttttgccactttaaatactaaaggaaatgaaggagatactgtaagggattccattggcttcatttcttctcaggtgcccgaagacccttctactttagttactgtagatgaaatacaagatgacagcagtgatttgcatttagtgactttggatgaagtaactgaagaggatgaagactctctggcggattttaacaaccttaaagaagagcttaattttgttactgttgatgaagttggagaggaggaagatggagataatgatttaaaagttgagttagcacaaagcaaaaatgaccatcccacagataaaaaagggaatagaaagaagagagctgtggacacaaaaaagacaaaacttgaatccttgtcccaagtgggtccagtaaatgagaatgttatggaagaagatctaaaaaccatgattgaaagacacttaacagctaaaactccaaccaagagagttagaattgggaaaactctgccatcagaaaaagctgttgtgacagaaccagcaaaaggtgaagaggccttccagatgagtgaagttgatgaggaatctggattaaaggattcagaaccagagcgaaaacgcaagaagactgaagactcttcttcaggcaaatcagtggcgtctgatgtccctgaggaattagactttcttgtacctaaggctggattcttctgtccaatttgttccctcttctactcaggtgaaaaagcaatgacaaatcactgcaagagtacacgtcataagcaaaatactgagaaattcatggccaagcaaagaaaggaaaaggagcagaatgaggctgaagaaagaagctctaggtgattgggggaaaggaaagaattcactagaaatttgtttagggtccagttgatttgtgtatttttgttatcatttaatttgtaattttcgtttcagaagcaaatattcgtgttgtacaaatttctgattgccctaaatgtagagagactgatggggaaagtatgatgggtttgatttttatatcaaatcatcaggcatggagaaatatcttttagaagtgttaaaataaatgttcctactgtatatttaaaatacaaaaaaaaaaaaaaaaaaa

What is claimed is:

1. A method for identifying whether a subject is afflicted with lung cancer, comprising detecting an immune response against an antigen identified in Table 2, 3 or 4, wherein detection of the immune response indicates that the subject is afflicted with lung cancer.

2. The method of claim 1, wherein the lung cancer is non-small cell lung cancer.

3. The method of claim 1, wherein the subject is a mammal.

4. The method of claim 1, wherein the subject is a human.

5. The method of claim 1, wherein the immune response is a humoral immune response.

6. The method of claim 1, wherein the immune response is a cellular immune response.

7. The method of claim 1, wherein an immune response is detected against 1, 2, 3, 4, 5, 6, 7, 8, 9, 10, 11, 12, 13, 14, or 15 of the antigens in Table 2, 3 or 4.

8. A method for determining whether a subject is likely to respond to lung cancer therapy with a composition comprising cancer cells that have been rendered proliferation-incompetent and have been genetically engineered to express GM-CSF, comprising detecting an immune response against an antigen listed in Table 2, 3 or 4, wherein detecting the immune response indicates that the subject is likely to respond to said lung cancer therapy.

9. The method of claim 8, wherein the lung cancer therapy is for the treatment of non-small cell lung cancer.

10. The method of claim 8, wherein the subject is a mammal.

11. The method of claim 8, wherein the subject is a human.

12. The method of claim 8, wherein the cancer cells are autologous.

13. The method of claim 8, wherein the cancer cells are allogeneic.

14. The method of claim 8, wherein an immune response is detected against one, two, three, four, five, six, seven, eight, nine, ten, eleven, twelve, thirteen, fourteen, fifteen, or more of the antigens listed in Table 2, 3 or 4.

15. The method of claim 8, wherein responsiveness to the cancer therapy is measured by decreased serum concentrations of tumor specific markers, increased overall survival time, increased progression-free survival, decreased tumor size, decreased metastasis marker response, increased impact on minimal residual disease, increased induction of antibody response to the cancer cells that have been rendered proliferation-incompetent, increased induction of delayed-type-hypersensitivity (DTH) response to injections of autologous tumor, increased induction of T cell response to autologous tumor or candidate tumor-associated antigens, increased impact on circulating T cell and dendritic cell numbers, phenotype, and function, cytokine response, reduced metastasis as measured by bone scan/MRI, increased time to progression, decreased serum concentrations of ICTP, decreased concentrations of serum C-reactive protein or decreased numbers of circulating tumor cells.

16. The method of claim 8, wherein responsiveness to the cancer therapy is measured by decreased serum concentrations of tumor specific markers.

17. The method of claim 8, wherein responsiveness to the cancer therapy is measured by increased overall survival time.

18. The method of claim 8, wherein responsiveness to the cancer therapy is measured by increased progression-free survival.

19. The method of claim 8, wherein responsiveness to the cancer therapy is measured by decreased tumor size.

20. The method of claim 8, wherein responsiveness to the cancer therapy is measured by decreased metastasis marker response.

21. The method of claim 8, wherein responsiveness to the cancer therapy is measured by increased impact on minimal residual disease.

22. The method of claim 8, wherein responsiveness to the cancer therapy is measured by increased induction of antibody response to the cancer cells that have been rendered proliferation-incompetent.

23. The method of claim 8, wherein responsiveness to the cancer therapy is measured by increased induction of delayed-type-hypersensitivity (DTH) response to injections of autologous tumor.

24. The method of claim 8, wherein responsiveness to the cancer therapy is measured by increased induction of T cell response to autologous tumor or candidate tumor-associated antigens.

25. The method of claim 8, wherein responsiveness to the cancer therapy is measured by increased impact on circulating T cell and dendritic cell numbers, phenotype, and function.

26. The method of claim 8, wherein responsiveness to the cancer therapy is measured by reduced metastasis as measured by bone scan/MRI.

27. The method of claim 8, wherein responsiveness to the cancer therapy is measured by increased time to progression.

28. The method of claim 8, wherein responsiveness to the cancer therapy is measured by decreased serum concentrations of ICTP.

29. The method of claim 8, wherein responsiveness to the cancer therapy is measured by decreased concentrations of serum C-reactive protein.

30. The method of claim 8, wherein the immune response is a humoral immune response.

31. The method of claim 8, wherein the immune response is a cellular immune response.

32. A computer-implemented method for determining whether a subject is likely to respond to lung cancer therapy with a composition comprising cancer cells that have been rendered proliferation-incompetent and have been genetically engineered to express GM-CSF, comprising inputting into a computer memory data indicating whether an immune response against an antigen listed in Table 2, 3 or 4 is detected, inputting into the computer memory a correlation between an immune response against an antigen listed in Table 2, 3 or 4 and a likelihood of responding to said therapy, and determining whether the subject is likely to respond to said therapy.

33.-55. (canceled)

56. Computer-readable media embedded with computer executable instructions for performing the method of claim 32.

57. A computer system configured to perform the method of claim 32.

58. A method for determining whether a subject is responding to lung cancer therapy with a composition comprising cancer cells that have been rendered proliferation-incompetent and have been genetically engineered to express GM-CSF, comprising administering an effective amount of a composition comprising cancer cells that have been rendered proliferation-incompetent and have been genetically engineered to express GM-CSF, and detecting an immune response against an antigen listed in Table 2, 3 or 4, wherein detecting the immune response indicates that the subject is responding to said therapy.

59.-81. (canceled)

82. A computer-implemented method for determining whether a subject is responding to lung cancer therapy with a composition comprising cancer cells that have been rendered proliferation-incompetent and have been genetically engineered to express GM-CSF, comprising administering an effective amount of a composition comprising cancer cells that have been rendered proliferation-incompetent and have been genetically engineered to express GM-CSF, inputting into a computer memory data indicating whether an immune response against an antigen listed in Table 2, 3 or 4 is detected, inputting into the computer memory a correlation between an immune response against an antigen listed in Table 2, 3 or 4 and responsiveness to said therapy, and determining whether the subject is responding to said therapy.

83.-105. (canceled)

106. Computer-readable media embedded with computer executable instructions for performing the method of claim 82.

107. A computer system configured to perform the method of claim 82.

108. A method for determining whether a subject is responding to lung cancer therapy with a composition comprising cancer cells that have been rendered proliferation-incompetent and have been genetically engineered to express GM-CSF, comprising detecting an immune response against an antigen listed in Table 2, 3 or 4 at a first time, administering an effective amount of a composition comprising cancer cells that have been rendered proliferation-incompetent and have been genetically engineered to express GM-CSF, and detecting an immune response against the antigen listed in Table 2, 3 or 4 at a later second time, wherein an increase in the immune response detected at the later second time relative to the earlier first time indicates that the subject is responding to said therapy.

109.-131. (canceled)

132. A computer-implemented method for determining whether a subject is responding to lung cancer therapy with a composition comprising cancer cells that have been rendered proliferation-incompetent and have been genetically engineered to express GM-CSF, comprising administering an effective amount of a composition comprising cancer cells that have been rendered proliferation-incompetent and have been genetically engineered to express GM-CSF, inputting into a computer memory data indicating whether an immune response against an antigen listed in Table 2, 3 or 4 is detected at a first time prior to said step of administering and at a later second time subsequent to said step of administering, inputting into the computer memory a correlation between an increase in the immune response against the antigen listed in Table 2, 3 or 4 at said later second time relative to said earlier first time and responsiveness to said therapy, and determining whether the subject is responding to said therapy.

133.-155. (canceled)

156. Computer-readable media embedded with computer executable instructions for performing the method of claim 132.

157. (canceled)

158. (canceled)
